United States Patent Application Publication US 2021/0254182 A1 - sequence listing, part 12

SEQ ID NO: 94 - DNA, 4006126 bp, Phytopthora sojae (residues 1-2,003,063 of 4,006,126)
  misc_feature (19197)..(19296): n is a, c, g, or t
  misc_feature (23981)..(26996): n is a, c, g, or t
  misc_feature (44733)..(46144): n is a, c, g, or t
  misc_feature (235642)..(235741): n is a, c, g, or t
  misc_feature (275184)..(275283): n is a, c, g, or t
  misc_feature (692136)..(692235): n is a, c, g, or t
  misc_feature (1131161)..(1131260): n is a, c, g, or t
  misc_feature (1187854)..(1187953): n is a, c, g, or t
  misc_feature (1370594)..(1370693): n is a, c, g, or t
  misc_feature (1530312)..(1597116): n is a, c, g, or t
  misc_feature (1649981)..(1650617): n is a, c, g, or t
  misc_feature (1652846)..(1654016): n is a, c, g, or t
  misc_feature (1779910)..(1780009): n is a, c, g, or t
  misc_feature (2043017)..(2043116): n is a, c, g, or t
  misc_feature (2103393)..(2116209): n is a, c, g, or t
  misc_feature (2121198)..(2123954): n is a, c, g, or t
  misc_feature (2151998)..(2169654): n is a, c, g, or t
  misc_feature (2179113)..(2182362): n is a, c, g, or t
  misc_feature (2186034)..(2186373): n is a, c, g, or t
  misc_feature (2446760)..(2446859): n is a, c, g, or t
  misc_feature (2520565)..(2520664): n is a, c, g, or t
  misc_feature (2667156)..(2667255): n is a, c, g, or t
  misc_feature (2706432)..(2706531): n is a, c, g, or t
  misc_feature (2731224)..(2732181): n is a, c, g, or t
  misc_feature (2872659)..(2872758): n is a, c, g, or t
  misc_feature (2897987)..(2898576): n is a, c, g, or t
  misc_feature (2910550)..(2921415): n is a, c, g, or t
  misc_feature (3004392)..(3004491): n is a, c, g, or t
  misc_feature (3075001)..(3075100): n is a, c, g, or t
  misc_feature (3084599)..(3089864): n is a, c, g, or t
  misc_feature (3296472)..(3296474): n is a, c, g, or t
  misc_feature (3296476)..(3296476): n is a, c, g, or t
  misc_feature (3296485)..(3296485): n is a, c, g, or t
  misc_feature (3745077)..(3745176): n is a, c, g, or t
  misc_feature (3748428)..(3748527): n is a, c, g, or t
  misc_feature (3757068)..(3758339): n is a, c, g, or t
  misc_feature (3767198)..(3767297): n is a, c, g, or t
  misc_feature (3775374)..(3775473): n is a, c, g, or t
  misc_feature (3974603)..(3974702): n is a, c, g, or t
  misc_feature (3992146)..(3992245): n is a, c, g, or t
ctcgtagatcggcggacgaccggagctcaggatagttttagcttacattcgattaacggagcaatatatcaaaccgtttgcttgatatactgaaacctagtaaaacaatctcaatattgacttatcaaagtcaataacgacatgatatactaaaatctagataaacatgtcaatgtcggtgtaaggcacaccaatggctacatacatttatgaccaccacgtcgggtggtccatacacatttaggattcctattggctgaaagcagcatcttttagccaatgagtgacttgcatgttagcagaatcctgccaaccagccgttggcagattcctagtttagaatattacatttagaggaagttagaaacataaaacaaaaatagcagttctcatcttttaccaaaacccgctacttggagtctttatcttgtttaaagtatactcgtggatctcgagtatacttaactcaagtaaaagaaacctacgcttcctcatacacgtgcgcatacgtgtaagccgtagtagtgagccaaggtaggcccattacagaaccagcagcaatgcgttggcgctgccactccagacggcctggccgctggctgaagcgtggatccggcgcaaactcgggtgtgtggccacgacgaacagcgcgtttcagcgaagagcacgtcggttgcgggtcgatggtgtcgctcggggaggccgtttgaatgcgattggcgggcaacagggcgtagcgtgtgtccgtggcagtgcgcgtgcggtgcgtttgtgtgcgtagcgcgcgcaggggcgaggacaaagcggtccgaaaaatggaggttaggttttccattttgctgggcgcatagcgcagtggtagcgcgtccgctttgcaagcggaaggccccgggttcaatccccggtgtgtccaaccctttgttcgactcacctcctcttgcacgcctacctacatgcctgcttgcgacggcccgcaatgccgccgctttatgccctgcgtacagctggatagccgctccagatcgcaccacccagtccaaagctcgcctcgcagctttccaccgcaccccccgatgcacgaggtcggttcgatgaccgctacgccgaaccagcagcaatgcgttggcgctgccactccagacggcctggccgctggctgaagcgtggatccggcgcaaactcgggtgtgtggccacgacgaacagcgcgtttcagcgaagagcacgtcggttgcgggtcggtgatggtgtcgctcggggaggccgtttgaatgcgattggcgggcaacagggcgtagcgtgtgtccgtggcagtgcgcgtgcggtgcgtttgtgtgcgtagcgcgcgcaggggcgaggacaaagcggtccgaaaaatggaggttaggttttccattttgctgggcgcatagcgcagtggtagcgcgtccgctttgcaagcggaaggccccgggttcaatccccggtgtgtccaaccctttgttcgactcacctcctgcacgcctacctacatgcctgcttgcgacggcccgcaatgccgccgctttatgccctgcgtacagctggatagccgctccagatcgcaccacccagtccaaagctcgcctcgcagctttccaccgcaccccccgatgcacgaggtcggttcgatgaccgctacgccgaaccagcagcaatgcgttggcgctgccactccagacggcctggccgctggctgaagcgtggatccggcgcaaactcgggtgtgtggccacgacgaacagcgcgtttcagcgaagagcacgtcggttgcgggtcggtgatggtgtcgctcggggaggccgtttgaatgcgattggcgggcaacagggcgtagcgtgtgtccgtggcagtgcgcgtgcggtgcgtttgtgtgcgtagcgcgcgcaggggcgaggacaaagcggtccgaaaaatggaggttaggttttccattttgctgggcgcatagcgcagtggtagcgcgtccgctttgcaagcggaaggccccgggttcaatccccggtgtgtccaaccctttgttcgactcacctcctcttgcacgcctacctacatgcctgcttgcgacggcccgcaatgccgccgctttatgccctgcgtacagctggatagccgctccagatcgcaccacccagtccaaagctcgcctcgcagctttccaccgcaccccccgatgcacgaggtcggttcgatgaccgctacgccgaaccagcagcaatgcgttggcgctgccactccagacggcctggccgctggctgaagcgtggatccggcgcaaactcgggtgtgtggccacgacgaacagcgcgtttcagcgaagagcacgtcggttgcgggtcggtgatggtgtcgctcggggaggccgtttgaatgcgattggcgggcaacagggcgaagcgtgtgtccgtggcagtgcgcgtgcggtgcgtttgtgtgcgtagcgcgcgcaggggcgaggacaaagcggtccgaaaaatggaggttaggttttccattttgctgggcgcatagcgcagtggtagcgcgtccgctttgcaagcggaaggccccgggttcaatccccggtgtgtccaaccctttgttcgactcacctcctcttgcacgcctacctacatgcctgcttgcgacggcccgcaatgccgccgctttatgccctgcgtacagctggatagccgctccagatcgcaccacccagtccaaagctcgcctcgcagctttccaccgcaccccccgatgcacgaggtcggttcgatgaccgctacgccgaaccagcagcaatgcgttggcgctgccactccagacggcctggccgctggctgaagcgtggatccggcgcaaactcgggtgtgtggccacgacgaacagcgcgtttcagcgaagagcacgtcggttgcgggtcggtgatggtgtcgctcggggaggccgtttgaatgcgattggcgggcaacagggcgtagcgtgtgtccgtggcagtgcgcgtgcggtgcgtttgtgtgcgtagcgcgcgcaggggcgaggacaaagcggtccgaaaaatggaggttaggttttccattttgctgggcgcatagcgcagtggtagcgcgtccgctttgcaagcggaaggccccgggttcaatccccggtgtgtccaaccctttgttcgactcacctcctcttgcacgcctacctacatgcctgcttgcgacggcccgcaatgccgccgctttatgccctgcgtacagctggacagccgctccagatcgcaccacccagtccaaagctcgcctcgcagctttccaccgcaccccccgatgcacgaggtcggttcgatgaccgctacgccgaacctgtaacggggttacacgcacaagtggctacagtcacttgttactctaacagatgcgatgtctgctagaggttcgaacacttcctcgaccttggtgtaaggcacaccaatggctacatacatttatgaccaccacgtcgggtggtccatacacatttaggattcctattggctgaaagcagcatcttttagccaatgagtgacttgcatgttagcagaatcctgccaaccagccgttggcagattcctagtttagaatattacatttagaggaagtcagaaacataaaacaaaaatagcagttctcatcttttaccaaaacccgctacttggagtctttatcttgtttaaagtatactcgtggatctcgagtatacttaactcaagtaaaagaaacctacgcttcctcatacacgtgcgcatacgtgtaagccgtagtagtgagccaaggtaggcccattacagaaccagcagcaatgcgttggcgctgccactccagacggcctggccgctggctgaagcgtggatccggcgcaaactcgggtgtgtggccacgacgaacaacgcgtttcagcgaagagcacgtcggttgcgggtcggtgatggtgtcgctcggggaggccgtttgaatgcgattggcgggcaacagggcgtagcgtgtgtccgtggcagtgcgcgtgcggtgcgtttgtgtgcgtagcgcgcgcaggggcgaggacaaagcggtccaaaaaatggaggttaggttttccattttgctgggcgcatagcgcagtggtagcgcgtccgctttgcaagcggaaggccccgggttcaatccccggtgtgtccaaccctttgttcgactcacctcctcttgcacgcctacctacatgcctgcttgcgacggcccgcaatgccgccgctttatgccctgcgtacagctggatagccgctccagatcgcaccacccagtccaaagctcgcctcgcagctttccaccgcaccccccgatgcacgaggtcggttcgatgaccgctacgccgaacctgtaacggggttacacgcacaagtggctacagtcacttgttactctaacagatgcgatgtctgctagaggttcgaacacttcctcgaccttggtgtaaggcacaccaatggctacatacatttatgaccaccacgtcgggtggtccatacacatttaggattcctattggctgaaagcagcatcttttagccaatgagtgacttgcatgttagcagaatcctgccaaccagccgttggcagattcctagtttagaatattacatttagaggaagtcagaaacataaaacaaaaatagcagttctcatcttttaccaaaacccgctacttggagtctttatcttgtttaaagtatactcgtggatctcgagtatacttaactcaagtaaaagaaatctacgcttcctcatacacgtgcgcatacgtgtaagccgtagtagtgagccaaggtaggcccattacagaaccagcagcaatgcgttggcgctgccactccagacggcctggccgctggctgaagcgtggatccggcgcaaactcgggtgtgtggccacgacgaacaacgcgtttcagcgaagagcacgtcggttgcgggtcggtgatggtgtcgctcggggaggccgtttgaatgcgattggcgggcaacagggcgtagcgtgtgtccgtggcagtgcgcgtgcggtgcgtttgtgtgcgtagcgcgcgcaggggcgaggacaaagcggtccaaaaaatggaggttaggttttccattttgctgggcgcatagcgcagtggtagcgcgtccgctttgcaagcggaaggccccgggttcaatccccggtgtgtccaaccctttgttcgactcacctcctcttgcacgcctacctacatgcctgcttgcgacggcccgcaatgccgccgctttatgccctgcgtacagctggacagccgctccagatcgcaccacccagtccaaagctcgcctcgcagctttccaccgcaccccccgatgcacgaggtcggttcgatgaccgctacgccgaacctgtaacggggttacacgcacaagtggctacagtcacttgttactctaacagatgcgatgtctgctagaggttcgaattttaggtattttttctttaactattcatagaaacagctataatatacacaattgcacctttattatttgttctagtcggcttcaatatcctttatctatctatgatgtgccgatggtcccgtgtagcatgaatgtcgttcgatgtcatccaaaaaccttccccaatcgacagttcttcgaactgcgaataccaggatcaaaacgatgatggtattttaaaaatactattttatcctgtgttttgtaaggtccttcagaatcacaatgtgatttgtcgaaaatcggtatgattacactcgcccgaaaatgggccctgatgttgtactcgaggagctcttgtgctcgactacttggtcgtacaggaatgctagcgcttgatatgtagtgtatatctatgctctacatgttggtaaagtccgcaacgcattatattgttcagcggatcttttatatgcataaggtcaaataatgtcacacttgagtggtgtacttgaggcagagtccagtttaaaaaaacgtccagttttaaaaaaagcgcaattcgaggtcaatgtacgtaaatcgagatcgttcatgctaccatctctgttttgtgccctgattggtgcccctcctcgatctaggtcattaaacggggcgacattttatctgcaaagcacaatacacgtaaggtacgatgccagagtcgcgtgcaatctgccagttccctgccactttagcttcaaccaattagaacgctgaaaatatgtttaaagaaccctattggtaaaaagtctgtaagcgctaccagccagtaaaacccgccaaactgtatacgaccaagacacatttcccgcgagtttgagctcagtctcctatttcctgaagcctataaactacccaccaacgccgcagcgaccacctcgacaatgcccgcgtacgagatcgaagacctcaattctgcagtgaagcgcgtcttcgccggcgacagcgcccgcagtgtcagcgacagcaccccaattccgtatcaaatgggtcgtgaaggggaaaatgggcatcttccgcgcacctgttcgtcatggcccggctccgctgctctcgcaactagcggaggcatgcttggtctagtggattgtctggcgccaactggtcggtcaccccgcaagtcgcaaggagatcatcttcaaagccggcaccatgatgtccatggccactggccaaacagttggtggcgagtggtaccgccgcttcatggggcgacacctgatgctggcaacccgaacgtctcaggcggttgcaaagcccgcaacgctgtgaccaagagcgatctcgagcagctttttagctcgttgatcaaggctgtgattgagaatcggttggacgcgtctcgcgtgttcaacatggacgaaacagcattccagaccaaaaagggctccaagtgtgtcgtggtggctcgaggctccaagaacgtttgacaccaagacgttgcgctcaattttcacctcacgctggtcgtgtgtggcagtgcgtcggggtgcatggtgccaccgcttttcgtgctgtcggtgttggcagtcaagctcgaagttctcgatggctgtgccatatccggagctgtcgtcaccacctcgagctccgggttcatgaaaggatttctctttctcgagtggctgcgctttttttcggctagcgtgcccaaggacgtacagcgacctcttctcctgattctggatgggtgttcgtctcattactccgtggagatcatcttagaggcagctcggcttggcgtgcttctgttgttgcttcgaacgcgacccacctgcttcaaccactggatgtcgctgtgttttcgtcgttcaaggcgaagctacgccgtctaaccgaaatctacgttggcgagactggacgcaattcggtcgacaaagaggaagccatccggatggcaagcgcagcatgggtaggatgccagatgggtgagaatgtcaaagtggggtttgctgggtgcggccttttccctccgtccaagcctcgtatggacatatgcatcgataatttccggcgcaacgggaccctcgcatccacatagctggcagcgtggattcggatcaaggaggtcgtgcagaaggaggttcttgtgcaaccgccgtccaagaagcgcgtgcgcaagacagcaacggtcgccggtcgtcttttggccaaggaaacactggaagcgatggcacaaccggtgaagaagcccaagaaggcagccaagacgaagaaggatccgatggcaacgaagacgaagagggtgccgtctccggtgccgggtcctgtgcagctgcagttccagtctgcgtcgaagcacggtgaggcaaaccagcaggaggaagttgtgtgggaggcgatagtttaatataaccaaagaaaaaagcttttgctggggtattttcctccacattgtcttcgttggttttgttgtttatttcctactttctatagtgatacgatatccctctgtatgcctgggcccgctgtgatgtccggttttttaatctcaaaccgttatcagaaggggaacccgactcatggtacttagcatactggcggtcaatcagttcacttggtggcagcttcgcagttctatgacagccccctaatgctctaagtgacagttagcacactagtgtttaggttgagttaatgctgccaggtggaatcgaaccaccgtcctctcggttatgatccgaggataccacaaagctatggcagcgctgcctctgagcacaaatcagactctatacacaactcacataatattgtgtaccacattgtaatatcgtatatcctgtcttatacgatttcaaatgggtacaaatcattttgtactggttgtttcggtgctgtcatgagagcagaagagatttcccccttacaataccacagataaaatgcggcagataactggtgctgccatgaatgggcttgcaaatagtcagcaactcctaattgagttctcctttactgtagagctcagtaaaacagtctgctaacagaagagattgcgctctcgtcagatatgcgtttacatctcaaaactaattgcccaataaaaagttatgagcaaaacagtgagcggggtgacattaaggcacacaagtggcacaataccttacataataatcatggctccgatttagggagtttttcttacgtttttttgtatgcacacctctttactttaattgtactgagcacgacgctgggtgtagacggctatctaaacattcaaatttgaaagcctacttattgtagatcttttaataggggtcgactgtcacggcacaataccgtggatcgccaaggtgcagcctcctcctgacctgacggcctctgagcagagctgggaaaacctgttgattttcaacaaaaactaattagtttatgggtttttgggtaggtttaaactgattatactaggtctaaaccatacatcgtccactgtcatactcgctccaacgtatcacccttttcatcccagcgaatgaataatatgcttatagtgtactactaaggatttcgtagttcgttccgatgtgcatcactgatgcaggatccgtttctgtagttcccataggcatgcatggattccttccattatgtacgagcccgtacgcatcgctaccaatgcactactgtagttttcagccttgcaaacctcgataaaggtgttcatggacgcattgaggcacccgtgaacctcatgaatgtttttaccaaatgcaacggatgcacgcacagaatgctgtttctgtttgtggccgacagatttcaattgaaatcaccaagttttccccatagccctctcaatccagactgggacacagttacagatacttctccttagacccttcctccgtagccggatgaagctagatttggctggtaacacaataacaacatcatttaagcataagtcgcgccacaatggcttctcctacaaagggcaagtatgccctgggtgggcatggctacaacgccaagtcgaccgtaataagtcaaactcagtcaagacacgcccccttgcaatatatttatgtaacaggcaggcgccccatgcagaaaaaagttaaacttatagtaagtggtaactatgatgaagttgaacctaaaacccagcaaaactcgactggtaggtttttgagtttaacctaggggaaaacctaatgattaaacccaaattgccagctctgcctctgaggttacgatcctttcctcggcgctgagctgcacgatcgcagttcgcgttggtttcatattttcctactctttcctttcacattagctacagctagaggcttgtagccactcttaacatcaatcagttttcatttttcgagcaatccaacaagtgcagactcatccacgtcaacttctaccagagcacgtgacaatttcgaaattagagtggaaaccctgaagaaaacgacaacaacaaatctcttgtagagcttcgataggcaagaagaccgtttgttaccacgaatatcagtccccgacagtcgtcctgaaacgacggtcactcagcgacaagcgccgagccagatcctcaagagcagattatgccgaaccaaggagagaacagtgagcacgtcgccgtcggcgatcaagtcatccaccgccgtctaactcggccccgccttcggcaccctcgatggagcaaatgatggcgcagatacttcagatgatgtcgatgcagcagcggtccttgatggcgagccatcagcagattccgagaacgttccttaacaaccaacagtagatgcacgagtttatggtgcagaaggtggccaaccagcaaaagtagcgtgcgaacccatctaagatccttggcaagcaggatgaggactcggagttgtaggttgaagagcatttagttgcctgcaccactgaacgcgaagccgacgactcgcggtccgttaacatgatggccgcctttcttggtcccgacgtaatgtcgtggtaccgagaatgtaaagcttcggtgagtgaggcatggtccttgttcaaagagcacagtcgagcacggctcagggacagcgactttgagtacaagctactcacgaatcgcgagttacggggtcgtagcacgagtaaacgtcgcagacgttcatcgagattcccggtatcaccaaacgttggttttaccagcagaacatccgggccgacacaaactcctacatccgccgaaatttccccgtgagccagcaagacacgattgagcatgtgcagcttcaaagatacccgcaagccaaatctaactcgcccgtcagcaggagtgccaagcgctactgccagatggccaggacagtcaccagcagccaggacgcggccgcagcgcagatgggtctccacaagccaggccagcaccgcccagcggcttcaagggccagaagtcaccagaccgttcgacgaaagggaactggcgcaaaaaaactaggcttctcagggggctggtgccccgccgataaaggctgcactaccgagaaccatacggcagaaccgcagtcactctctgcgactcagcattccttcgcctatgagcgcgatgatgcattgctgagtcgtcaggaaaaaagctttattgttacctggagcagctcgtgtccacgagtggcaccactgcctctgcttttatcggttgcggagcacctttcaacgctatcacaccagcactggcggagaagctcaacctcaagatccaggagcacaagcatccgttgaagctaaggcagggagcaggcggcgtctcgtttgttcctcaacgcacttgcacgctgtccgcataactacctggattcccgcgctatggcgtcctgaaggtgccagagactcaagatttactgctgggaatgccttcgttagtcgaggccaatcctctaatcgactggtcaaagcgagtaatttcaccaaggtcctcaccgaagggtgatcaacgagccaagtcaccgcctgggctggcccgtcctgcgcaacaggcattaccattcaagccgtgcgtgccgcggcagagagctcgtctcattgctggtcagcgctccttgcgaattcaataccattctgaggatctcgcgcccttacaagtctacctacggcacggccacgacggtaatcaagatcgggcccaaattgttcggagtcgtgacatccccaagctgttgggcgaggaagttcgcgagttatgtctttttatttcgtcagatacagcaagttccaagactgacgacacatgacaaactcgcctattcatcctgtcatcagcaagtatcacgaccgcgcgtttcgttccacattaccaaacgttcctcctactcgacacgaaggcagggacgccaccatagaagcttcagacgccacacctgttcattggaaacaattcccgctttctccgggcagaagacgacaatacaagcttgggttcgcgagatgctgcaagcaggaatcatcagaccggcctcttctgcgcgcgcaaacgttccagtgagtggaggattgtacatgactgcctcggactcgactcagacatcgaggttctagcaaacccaattctgcgcaaggacgagatcttgcgcgcgatggctcacggtaaaaaatttccgcgatggccgtactttggggctttatcaggtgaagctgaacgaaaactccatcccgtacacggacttagcaacaccagtcggacggttcgtgtacctcgtcactccgatcggtatctcgagtagtccatcgtgctaaaccgactagtccaggtgattttctcggacttcaacagcttctgtcaaacttatgttgacgatctaactactcgtgtttactaaaactaagtcgatggaggcgcatctggcagcactggacatggtattggagcgtcgtcccatgagaatctctgcattaagattgagaagtgtgtatattgccagcccgggatcccgcgtcttggcgactacatcggccgtaacggggtgcggatgaatcccaacaagtgtaaaagtatctgcgactggcctctttccaagacaaagtgtgacatgcaagtattcatcaggatttgtgcatatgtgatgagattttgagacgggttcgctgagcaagtggcgctattaacggagttggtccgcaataagcgtcctcagtaccctatcacactcaacccccagcagcttggtgcgttttcgacactcaaggcaagctgacctcacatcccgtccttgaacgatcggactttactagcccgttccactttaaccctttagctacgaggcttcgtacgggtccagtctgacctatacgacagctcataattggttacaattggctataatacgttgtacgggctaggtagaagctggcggagtcacccaacaggtccaagcggacctgtaccatagccacatgtgagcaaatcaacaagctggtgcgtaccgatataagactcgggcaggttctattctattctacaactcgcgagcggcaaatcacacgaaaaccaaaatccataagtacaggtttgatgaggggttgacgagagctgccattggtctaaatggtccgaaaccgcgttgtggttggttgtggtacatatccagggggagacctacactgcaaagctcgtagctaaagggttaacgtcgatgcgtcggactttgcagtgggcggctacccctttcagctggatgacaacggaggcgagttacggcggacgcaagctgacgaagccggagttagtttacctggtgtgcgagaactgatggtggcgttgcatgcgaagcggatctggaaagtttacgtgctggatcgatatttttcctgaatacggttcgccacacgatcgagagtatcctgcaacagcaaacatactcccaacatttagtccggaagcttaacgagcttgcgttgttccggccagggtaccacgcagcacgaacatcgcgctgatgcgatctcaaaacgtaccgactggaataacggcactgtttgggttaccaggctctcgaccttgatcaacgctatggtcatgaatgaagaatttgatgcagacgaggtgcttctccatcagactgaacatccaatggatattgagcgtggatgtcgccagggttatgcttcggacaattagcttggcctaactgtgcgcgatcaacgtgccaataacgggccccctagccgctgctgccggcgattcaccgttgacgacagctttctatacttccagctgcaaccggctttgccgcgactctgcgttcccgatgccccaggtatgcgtaagtgtgttcttttcgaggagcataacgtcccaacccgcggccacccaggccaagcaaagactttgctccacgtcttcgagaaattgtactgaaagagcatggctacgtcggtcgaccactacgttgcatcgtgcgagctctgtcagtgcaacaaatgtggaacttctacatctacttgaaatttcttagcaaagatggctgcatatcagtatggacttcctcacaccactccccaccaccactactggctacgatgaggtgctggttattgtggatcgcctcaccaagccagcgcatttcctacttagtcatgcaactgtaccggcggcgtcgagtgctcaactgtttagctcgttttatcagcggttgcatgggctaccatggtcaatcatttaaaatcgcgacacgaaatttacggcggcgatatgacgcttcatcatggagtggtagggtactcggcttcacgacagtgctgcgttcaaaccctcgacggacggacagcctgatgcgacgatcatattcatcaatcactccgtttacagtaaggttgaagtagggaagccgtggggcaaggtcttacggcgttgatgaccaagatatgccgtggtagtcaattcggtaaatcgtagcgataacgaccccttcacggtatcacgcagcagtcagtcagcaagtgtcgcagcgacaagtaatactgcagtaccaaggctacgatacagagttggtctctaaacgcaaataagttcctacggttaaaccacttgagcactttatctttcacaaatgtaatagaatgaaatcactcagcgagtactttccaaactgcggaagtttgacgacgggtcgatctccatttttcgcaccactttttcctcgcccctgcgcgctacgcaccgaaactcaccacacgcctactaccacagacgtacgctacgccctgttacccgccaatcgcatccaaacgacattcccgagcgacaccatcaccgacccgcagcctcgtgccttcaaggcgctacatgagtggtctagctgctaggcgatgccaggagtaacttcattcaatcaatcagttctcaattcgactcaaaggactcaagtggcttggcaaaggctgcttcggaccgagcgtggaagatcagatccgccgtcgaagtcctccagaaaacgtttccctcggggtacaagacaccaccagcgatttcattcgtcgaaggcatgttgccttcgaagaatcggaataacccgacccgccagtacatgaaggtgaagcctcacaagcggagtagtaagctgttcctgacgtattgtgctgctactactgcatgaggtaagaggtgccgcgagttcttcggagctcgcggtgtgtttttttttgctaagtatttcatgttgtagggagcttaatgttgtatgtactgactgatactgcatcctacaacatgtagacttgaagtatattgtggcaaggcgcagctgctcaattgctcaatgaggtgggtaacgtcccagcagccagcagtcagcggatgcaaagagcgggccctcagcggtgatccgcaaccttgatgcggtgcttccacctcgtggtgaccgatcggttttacacatcggtgcaatttgcactccaacttctgcaccgggacgtctataatatatgcactatcactggcgccaaggttggatacccgccacaacttgtcgtggagaatcgtgaccggcccaaacgattcccgcacgggacgacaagaatggcagtagcaaaaagctgtattatgatgacaggtttggtatggtgggatcgaaaacctgtgcagttcatggggacaggaacaagtcgagccatggagacgtgttgtacgtatatgtagaaacaaagttattttgttttggaaaaactaacgttatgttttatcttatcaaagaggcgaacacgtgatacacagagaaggcggagcgatgttccatgcccagcgatgatccgcgactatcacagatggatggacggagtcgacattcatgaccagctccgcctccagtactactcgctacaaaagcaggcttggtgcaaaaaatacttaagtccctcttttgggggcttgtagatgttgccatcgtgaacgcctacattgtcttccgtgaggcgcaaaaggaaagcactgagaagcctgtgccgcgcgctgagtttctgatggagccgcatgctgcgttgctggacttgccagagagcgacttcgccgaacaagtaagttttccatgttgtatgtggtagatgttgtatgttagcggtggttgcacatgctgtcggatgcccatgttggatgtttagccaacaacatcatgcatgttctacatgttgtattcctgtgaggtatgcaatcatatacatgttggattgatgtcatgttggaggtgagctaacaaagtgtttgcttgtaggcttccccacatgagcctgcagatggtgatgtgctttctccgttgccacggggccacgagcgccaagaatggccagagtaccagtatgtcaatgggatacgcaaacgttggcagcgtcactacaaggtctgccccgttctgaagcgccggtttggagagcgtcgcgccacgaagtactactgtgctgtctgcagcaagtcggacaaagctcggtactgttatctgcagcatgtatctatgtaacaaaatttggccacaacactatcctggaaacgccatgagctgttaccagatctggtaccacaagcgggaaaatggaacgaagcgcccgaagccgcggtgcgggcgaaactttcaaagtcgagaggcaggcgctagcaagaccgccggaaagcgcaagcatcaagccaaagcaacgagggggaagatagcgaggaggcagctgcacacagcagcagcagcaacgtcgaaggagatgtaagttccggcggaggttgacagtgaggagaaagataagtgtttgacaatgaatgttgggctggccggtgaaggttaccatttcgtgcggttgttgtgtgtattcatttgatgcgttgtatatttcgcgcaagagacattgaatactaccttgctttacgcactccaggctgccctcgtccagtctctggataaaaaggccgctagtcgctcatccgaggagcgccatcatgctgtatctacaccatgtacatactgtaggtacaacgtggaggagtgatttgctgaaatggtcatgttgttgttgtacacagccgggcgtcgaaattatacgagacaaaagtaaacgtaagggttgcgcaactttaacatgctgcatgagtaacatgttgggcgagcaccgtgaaataaaaagcaggtaaaaaaaacttgggcgctaaggggttaacgagcacgattctgcttcggtcgagccatattcttaaatgatacatggccaactgtcctttccgataatcttattatcatcaggtattacagttcaattgggttgtccaatcgtagctagcttgaatcatccattctactggtgatggcatcgatggtctaccatctccattaaattctacaggatcgcatgcacttcgtagaacgttctgtaactgtcgcaggtagcccaccactcaacgcaccaaaaggtgtagtagaacatagtattgttgcctcaggccactagatagtgctctaaatgcggataacgcgggtctaactacggcttctatccttcatttggggcgagttgtgttctaggtgcaaacggagaccgaacagagtttagtgcagtccctgggagcttcattttgtatcgctatgaatccctccaacagcctaacgtttgaatttgcttcaacacgtgaacgcttgcaagccgttgcggtcacatacattttttctactgcaatgtcttgttacactacgctgctcctcagcatcaacttgaaggggttgagtcattagacaatcgaacaggcgatcgtgtcatggcttttcgctatcacatgaagtgcattgcgtgaaacgacttagtcaggacaatagattttgtacggccttacagccgtactatcaatctcacgtgtcaatttgcctagcaaagccagcccccacccaccacccccaccccctaaagcccgatcatgtcttcgcctccggactccgattccgccacctcaagtgacagatatgtcgtcgctctgcaggcaggcttcacttgaaatgtacctgggtgcaccaaccaaggtaggtctatccggaccccaagacttacatgccacttgagcaccgggtacaagtgccacgcgcactgccacagacacacgctacgccctgttgcccgccaatcgcattcaaacggcctccccgagcgacaccatcaccgacccgcaaccgacgtgctcttcgctgaaacgcgctgttcgtcgtggccacacacccgagtttgcgccggatccacgcttcagccagcggccaggccgtctggagtggcagcgccaacgcattgctgctggttctgtaatgggcctaccttggctcactactacggcttacacgtatgcgcacgtgtatgaggaagcgtaggtttcttttacttgagttaagtatactcgagatccacgagtatactttaaacaagataaagactccaagtagcgggttttggtaaaagatgagaactgctatttttgttttatgtttctgacttcctctaaatgtaatattctaaactaggaatctgccaacggctggttggcaggattctgctaacatgcaagtcactcattggctaaaagatgctgctttcagccaataggaatcctaaatgtgtatggaccacccgacgtggtggtcataaatgtatgtagccattggtgtgccttacaccaaggtcgaggaagtgttcgaacctctagcagacatcgcatctgttagagtaacaagtgactgtagccacttgtgcgtgtaaccccgttacaggttcggcgtagcggtcatcgaaccgacctcgtgcatcggggggtgcggtggaaagctgcgaggcgagctttggactgggtggtgcgatctggagcggctatccagctgtacgcagggcataaagcggcggcattgcgggccgtcgcaagcaggcaggcatgtaggtaggcgtgcaagaggaggtgagtcgaacaaagggttggacacaccggggattgaacccggggccttccgcttgcaaagcggacgcgctaccactgcgctatgcgcccagcaaaatggaaaacctaacctccattttttggaccgctttgtcctcgcccctgcgcgcgctacgcacacaaacgcactgcacgcgcactgccacggacacacgctacgccctgttgcccgccaatcgcattcaaacggcctccccgagcgacaccatcaccgacccgcaaccgacgtgctcttcgctgaaacgcgctgttcgtcgtggccacannnnnnnnnnnnnnnnnnnnnnnnnnnnnnnnnnnnnnnnnnnnnnnnnnnnnnnnnnnnnnnnnnnnnnnnnnnnnnnnnnnnnnnnnnnnnnnnnnnntgcatcggggggtgcggtggaaagctgcgaggcgagctttggactgggtggtgcgatctggagcggctatccagctgtacgcagggcataaagcggcggcattgcgggccgtcgcaagcaggcatgtaggtaggcgtgcaagaggaggtgagtcgaacaaagggttggacacaccggggattgaacccggggccttccgcttgcaaagcggacgcgctaccactgcgctatgcgcccagcaaaatggaaaacctaacctccattttttggaccgctttgtcctcgcccctgcgcgcgctacgcacacaaacgcactgcacgcgcactgccacggacacacgctacgccctgttgcccgccaatcgcattcaaacggcctccccgagcgacaccatcaccgacccgcaaccgacgtgctcttcgctgaaacgcgctgttcgtcgtggccacacacccgagtttgcgccggatccacgcttcagccagcggccaggccgtctggagtggcagcgccaacgcattgctgctggttctgtaatgggcctaccttggctcactactacggcttacacgtatgcgcacgtgtatgaggaagcgtagatttcttttacttgagttaagtatactcgagatccacgagtatactttaaacaagataaagactccaagtagcgggttttggtaaaagatgagaactgctatttttgttttatgtttctgacttcctctaaatgtaatattctaaactaggaatctgccaacggctggttggcaggattctgctaacatgcaagtcactcattggctaaaagatgctgctttcagccaataggaatcctaaatgtgtatggaccacccgacgtggtggtcataaatgtatgtagccattggtgtgccttacaccaaggtcgaggaagtgttcgaacctctagcagacatcgcatctgttagagtaacaagtgactgtagccacttgtgcgtgtaaccccgttacaggttcggcgtagcggtcatcgaaccgacctcgtgcatcggggggtgcggtggaaagctgcgaggcgagctttggactgggtggtgcgatctggagcggctatccagctgtacgcagggcataaagcggcggcattgcgggccgtcgcaagcaggcatgtaggtaggcgtgcaagaggaggtgagtcgaacaaagggttggacacaccggggattgaacccggggccttccgcttgcaaagcggacgcgctaccactgcgctatgcgcccagcaaaatggaaaacctaacctccattttttggaccgctttgtcctcgcccctgcgcgcgctacgcacacaaacgcactgcacgcgcactgccacggacacacgctacgccctgttgcccgccaatcgcattcaaacggcctccccgagcgacaccatcaccgacccgcaaccgacgtgctcttcgctgaaacgcgctgttcgtcgtggccacacacccgagtttgcgccggatccacgcttcagccagcggccaggccgtctggagtggcagcgccaacgcattgctgctggttctgtaatgggcctaccttggctcactactacggcttacacgtatgcgcacgtgtatgaggaagcgtagatttcttttacttgagttaagtatactcgagatccacgagtatactttaaacaagataaagactccaagtagcgggttttggtaaaagatgagaactgctatttttgttttatgtttctgacttcctctaaatgtaatattctaaactaggaatctgccaacggctggttggcaggattctgctaacatgcaagtcactcattggctaaaagatgctgctttcagccaataggaatcctaaatgtgtatggaccacccgacgtggtggtcataaatgtatgtagccattggtgtgccttacaccaaggtcgaggaagtgttcgaacctctagcagacatcgcatctgttagagtaacaagtgactgtagccacttgtgcgtgtaaccccgttacaggttcggcgtagcggtcatcgaaccgacctcgtgcatcggggggtgcggtggaaagctgcgaggcgagctttggactgggtggtgcgatctggagcggctatccagctgtacgcagggcataaagcggcggcattgcgggccgtcgcaagcaggcatgtaggtaggcgtgcaagaggaggtgagtcgaacaaagggttggacacaccggggattgaacccggggccttccgcttgcaaagcggacgcgctaccactgcgctatgcgcccagcaaaatggaaaacctaacctccatttttcgaaccgctttgtcctcgcccctgcgcgcgctacgcacacaaacgcaccgcacgcgcactgccacggacacacgctacgccctgttgcccgccaatcgcattcaaacggcctccccgagcgacaccatcaccgacccgcaaccgacgtgctcttcgctgaaacgcgctgttcgtcgtggccacacacccgagtttgcgccggatccacgcttcagccagcggccaggccgtctggagtggcagcgccaacgcattgctgctggttctgtaatgggcctaccttggctcactactacggcttacacgtatgcgcacgtgtatgaggaagcgtaggtttcttttacttgagttaagtatactcgagatccacgagtatactttaaacaagataaagactccaagtagcgggttttggtaaaagatgagaactgctatttttgttttatgtttctgacttcctctaaatgtaatattctaaactaggaatctgccaacggctggttggcaggattctgctaacatgcaagtcactcattggctaaaagatgctgctttcagccaataggaatcctaaatgtgtatggaccacccgacgtggtggtcataaatgtatgtagccattggtgtgccttacaccaaggtcgaggaagtgttcgaacctctagcagacatcgcatctgttagagtaacaagtgactgtagccacttgtgcgtgtaaccccgttacaggttcggcgtagcggtcatcgaaccgacctcgtgcatcggggggtgcggtggaaagctgcgaggcgagctttggactgggtggtgcgatctggagcggctatccagctgtacgcagggcataaagcggcggcattgcgggccgtcgcaagcaggcatgtaggtaggcgtgcaagaggaggtgagtcgaacaaagggttggacacaccggggattgaacccggggccttccgcttgcaaagcggacgcgctaccactgcgctatgcgcccagcaaaatggaaaacctaacctccatttttcggaccgctttgtcctcgcccctgcgcgcgctacgcacacaaacgcaccgcacgcgcactgccacggacacacgctacgccctgttgcccgccaatcgcattcaaacggcctccccgagcgacaccatcaccgacccgcaaccgacgtgctcttcgctgaaacgcgttgttcgtcgtggccacacacccgagtttgcgccggatccacgcttcagccagcggccaggccgtctggagtggcagcgccaacgcattgctgctggttctgtaatgggcctaccttggctcactactacggcttacacgtatgcgcacgtgtatgaggaagcgtagatttcttttacttgagttaagtatactcgagatccacgagtatactttaaacaagataaagactccaagtagcgggttttggtaaaagatgagaactgctatttttgttttatgtttctgacttcctctaaatgtaatattctaaactaggaatctgccaacggctggttggcaggattctgctaacatgcaagtcactcattggctaaaagatgctgctttcagccaataggaatcctaaatgtgtatggaccacccgacgtggtggtcataaatgtatgtagccattggtgtgccttacaccaaggtcgaggaagtgttcgaacctctagcagacatcgcatctgttagagtaacaagtgactgtagccacttgtgcgtgtaaccccgttacaggttcggcgtagcggtcatcgaaccgacctcgtgcatcggggggtgcggtggaaagctgcgaggcgagctttggactgggtggtgcgatctggagcggctatccagctgtacgcagggcataaagcggcggcattgcgggccgtcgcaagcaggcatgtaggtaggcgtgcaagaggaggtgagtcgaacaaagggttggacacaccggggattgaacccggggccttccgcttgcaaagcggacgcgctaccactgcgctatgcgcccagcaaaatggaaaacctaacctccattttttggaccgctttgtcctcgcccctgcgcgcgctacgcacacaaacgcactgcacgcgcactgccacggacacacgctacgccctgttgcccgccaatcgcattcaaacggcctccccgagcgacaccatcaccgacccgcaaccgacgtgctcttcgctgaaacgcgttgttcgtcgtggccacacacccgagtttgcgccggatccacgcttcagccagcggccaggccgtctggagtggcagcgccaacgcattgctgctggttctgtaatgggcctaccttggctcactactacggcttacacgtatnnnnnnnnnnnnnnnnnnnnnnnnnnnnnnnnnnnnnnnnnnnnnnnnnnnnnnnnnnnnnnnnnnnnnnnnnnnnnnnnnnnnnnnnnnnnnnnnnnnnnnnnnnnnnnnnnnnnnnnnnnnnnnnnnnnnnnnnnnnnnnnnnnnnnnnnnnnnnnnnnnnnnnnnnnnnnnnnnnnnnnnnnnnnnnnnnnnnnnnnnnnnnnnnnnnnnnnnnnnnnnnnnnnnnnnnnnnnnnnnnnnnnnnnnnnnnnnnnnnnnnnnnnnnnnnnnnnnnnnnnnnnnnnnnnnnnnnnnnnnnnnnnnnnnnnnnnnnnnnnnnnnnnnnnnnnnnnnnnnnnnnnnnnnnnnnnnnnnnnnnnnnnnnnnnnnnnnnnnnnnnnnnnnnnnnnnnnnnnnnnnnnnnnnnnnnnnnnnnnnnnnnnnnnnnnnnnnnnnnnnnnnnnnnnnnnnnnnnnnnnnnnnnnnnnnnnnnnnnnnnnnnnnnnnnnnnnnnnnnnnnnnnnnnnnnnnnnnnnnnnnnnnnnnnnnnnnnnnnnnnnnnnnnnnnnnnnnnnnnnnnnnnnnnnnnnnnnnnnnnnnnnnnnnnnnnnnnnnnnnnnnnnnnnnnnnnnnnnnnnnnnnnnnnnnnnnnnnnnnnnnnnnnnnnnnnnnnnnnnnnnnnnnnnnnnnnnnnnnnnnnnnnnnnnnnnnnnnnnnnnnnnnnnnnnnnnnnnnnnnnnnnnnnnnnnnnnnnnnnnnnnnnnnnnnnnnnnnnnnnnnnnnnnnnnnnnnnnnnnnnnnnnnnnnnnnnnnnnnnnnnnnnnnnnnnnnnnnnnnnnnnnnnnnnnnnnnnnnnnnnnnnnnnnnnnnnnnnnnnnnnnnnnnnnnnnnnnnnnnnnnnnnnnnnnnnnnnnnnnnnnnnnnnnnnnnnnnnnnnnnnnnnnnnnnnnnnnnnnnnnnnnnnnnnnnnnnnnnnnnnnnnnnnnnnnnnnnnnnnnnnnnnnnnnnnnnnnnnnnnnnnnnnnnnnnnnnnnnnnnnnnnnnnnnnnnnnnnnnnnnnnnnnnnnnnnnnnnnnnnnnnnnnnnnnnnnnnnnnnnnnnnnnnnnnnnnnnnnnnnnnnnnnnnnnnnnnnnnnnnnnnnnnnnnnnnnnnnnnnnnnnnnnnnnnnnnnnnnnnnnnnnnnnnnnnnnnnnnnnnnnnnnnnnnnnnnnnnnnnnnnnnnnnnnnnnnnnnnnnnnnnnnnnnnnnnnnnnnnnnnnnnnnnnnnnnnnnnnnnnnnnnnnnnnnnnnnnnnnnnnnnnnnnnnnnnnnnnnnnnnnnnnnnnnnnnnnnnnnnnnnnnnnnnnnnnnnnnnnnnnnnnnnnnnnnnnnnnnnnnnnnnnnnnnnnnnnnnnnnnnnnnnnnnnnnnnnnnnnnnnnnnnnnnnnnnnnnnnnnnnnnnnnnnnnnnnnnnnnnnnnnnnnnnnnnnnnnnnnnnnnnnnnnnnnnnnnnnnnnnnnnnnnnnnnnnnnnnnnnnnnnnnnnnnnnnnnnnnnnnnnnnnnnnnnnnnnnnnnnnnnnnnnnnnnnnnnnnnnnnnnnnnnnnnnnnnnnnnnnnnnnnnnnnnnnnnnnnnnnnnnnnnnnnnnnnnnnnnnnnnnnnnnnnnnnnnnnnnnnnnnnnnnnnnnnnnnnnnnnnnnnnnnnnnnnnnnnnnnnnnnnnnnnnnnnnnnnnnnnnnnnnnnnnnnnnnnnnnnnnnnnnnnnnnnnnnnnnnnnnnnnnnnnnnnnnnnnnnnnnnnnnnnnnnnnnnnnnnnnnnnnnnnnnnnnnnnnnnnnnnnnnnnnnnnnnnnnnnnnnnnnnnnnnnnnnnnnnnnnnnnnnnnnnnnnnnnnnnnnnnnnnnnnnnnnnnnnnnnnnnnnnnnnnnnnnnnnnnnnnnnnnnnnnnnnnnnnnnnnnnnnnnnnnnnnnnnnnnnnnnnnnnnnnnnnnnnnnnnnnnnnnnnnnnnnnnnnnnnnnnnnnnnnnnnnnnnnnnnnnnnnnnnnnnnnnnnnnnnnnnnnnnnnnnnnnnnnnnnnnnnnnnnnnnnnnnnnnnnnnnnnnnnnnnnnnnnnnnnnnnnnnnnnnnnnnnnnnnnnnnnnnnnnnnnnnnnnnnnnnnnnnnnnnnnnnnnnnnnnnnnnnnnnnnnnnnnnnnnnnnnnnnnnnnnnnnnnnnnnnnnnnnnnnnnnnnnnnnnnnnnnnnnnnnnnnnnnnnnnnnnnnnnnnnnnnnnnnnnnnnnnnnnnnnnnnnnnnnnnnnnnnnnnnnnnnnnnnnnnnnnnnnnnnnnnnnnnnnnnnnnnnnnnnnnnnnnnnnnnnnnnnnnnnnnnnnnnnnnnnnnnnnnnnnnnnnnnnnnnnnnnnnnnnnnnnnnnnnnnnnnnnnnnnnnnnnnnnnnnnnnnnnnnnnnnnnnnnnnnnnnnnnnnnnnnnnnnnnnnnnnnnnnnnnnnnnnnnnnnnnnnnnnnnnnnnnnnnnnnnnnnnnnnnnnnnnnnnnnnnnnnnnnnnnnnnnnnnnnnnnnnnnnnnnnnnnnnnnnnnnnnnnnnnnnnnnnnnnnnnnnnnnnnnnnnnnnnnnnnnnnnnnnnnnnnnnnnnnnnnnnnnnnnnnnnnnnnnnnnnnnnnnnnnnnnnnnnnnnnnnnnnnnnnnnnnnnnnnnnnnnnnnnnnnnnnnnnnnnnnnnnnnnnnnnnnnnnnnnnnnnnnnnnnnnnnnnnnnnnnnnnnnnnnnnnnnnnnnnnnnnnnnnnnnnnnnnnnnnnnnnnnnnnnnnnnnnnnnnnnnnnnnnnnnnnnnnnnnnnnnnnnnnnnnnnnnnnnnnnnnnnnnnnnnnnnnnnnnnnnnnnnnnnnnnnnnnnnnnnnnnnnnnnnnnnnnnnnnnnnnnnnnnnnnnnnnnnnnnnnnnnnnnnnnnnnnnnnnnnnnnnnnnnnnnnnnnnnnnnnnnnnnnnnnnnnnnnnnnnnnnnnnnnnnnnnnnnnnnnnnnnnnnnnnnnnnnnnnnnnnnnnnnnnnnnnnnnntgcaagtcactcattggctaaaagatgctgctttcagccaataggaatcctaaatgtgtatggaccacccgacgtggtggtcataaatgtatgtagccattggtgtgccttacaccaaggtcgaggaagtgttcgaacctctagcagacatcgcatctgttagagtaacaagtgactgtagccacttgtgcgtgtaaccccgttacaggttcggcgtagcggtcatcgaaccgacctcgtgcatcggggggtgcggtggaaagctgcgaggcgagctttggactgggtggtgcgatctggagcggctatccagctgtacgcagggcataaagcggcggcattgcgggccgtcgcaagcaggcaggcatgtaggtaggcgtgcaagaggaggtgagtcgaacaaagggttggacacaccggggattgaacccggggccttccgcttgcaaagcggacgcgctaccactgcgctatgcgcccagcaaaatggaaaacctaacctccattttttggaccgctttgtcctcgcccctgcgcgcgctacgcacacaaacgcactgcacgcgcactgccacggacacacgctacgccctgttgcccgccaatcgcattcaaacggcctccccgagcgacaccatcaccgacccgcaaccgacgtgctcttcgctgaaacgcgttgttcgtcgtggccacacacccgagtttgcgccggatccacgcttcagccagcggccaggccgtctggagtggcagcgccaacgcattgctgctggttctgtaatgggcctaccttggctcactactacggcttacacgtatgcgcacgtgtatgaggaagcgtaggtttcttttacttgagttaagtatactcgagatccacgagtatactttaaacaagataaagactccaagtagcgggttttggtaaaagatgagaactgctatttttgttttatgtttctgacttcctctaaatgtaatattctaaactaggaatctgccaacggctggttggcaggattctgctaacatgcaagtcactcattggctaaaagatgctgctttcagccaataggaatcctaaatgtgtatggaccacccgacgtggtggtcataaatgtatgtagccattggtgtgccttacaccaaggtcgaggaagtgttcgaacctctagcagacatcgcatctgttagagtaacaagtgactgtagccacttgtgcgtgtaaccccgttacaggttcggcgtagcggtcatcgaaccgacctcgtgcatcggggggtgcggtggaaagctgcgaggcgagctttggactgggtggtgcgatctggagcggctatccagctgtacgcagggcataaagcggcggcattgcgggccgtcgcaagcaggcaggcatgtaggtaggcgtgcaagaggaggtgagtcgaacaaagggttggacacaccggggattgaacccggggccttccgcttgcaaagcggacgcgctaccactgcgctatgcgcccagcaaaatggaaaacctaacctccattttttggaccgctttgtcctcgcccctgcgcgcgctacgcacacaaacgcactgcacgcgcactgccacggacacacgctacgccctgttgcccgccaatcgcattcaaacggcctccccgagcgacaccatcaccgacccgcaaccgacgtgctcttcgctgaaacgcgctgttcgtcgtggccacacacccgagtttgcgccggatccacgcttcagccagcggccaggccgtctggagtggcagcgccaacgcattgctgctggttctgtaatgggcctaccttggctcactactacggcttacacgtatgcgcacgtgtatgaggaagcgtaggtttcttttacttgagttaagtatactcgagatccacgagtatactttaaacaagataaagactccaagtagcgggttttggtaaaagatgagaactgctatttttgttttatgtttctgacttcctctaaatgtaatattctaaactaggaatctgccaacggctggttggcaggattctgctaacatgcaagtcactcattggctaaaagatgctgctttcagccaataggaatcctaaatgtgtatggaccacccgacgtggtggtcataaatgtatgtagccattggtgtgccttacaccaaggtcgaggaagtgttcgaacctctagcagacatcgcatctgttagagtaacaagtgactgtagccacttgtgcgtgtaaccccgttacaggttcggcgtagcggtcatcgaaccgacctcgtgcatcggggggtgcggtggaaagctgcgaggcgagctttggactgggtggtgcgatctggagcggctgtccagctgtacgcagggcataaagcggcggcattgcgggccgtcgcaagcaggcatgtaggtaggcgtgcaagaggaggtgagtcgaacaaagggttggacacaccggggattgaacccggggccttccgcttgcaaagcggacgcgctaccactgcgctatgcgcccagcaaaatggaaaacctaacctccatttttcggaccgctttgtcctcgcccctgcgcgcgctacgcacacaaacgcaccgcacgcgcactgccacggacacacgctacgccctgttgcccgccaatcgcattcaaacggcctccccgagcgacaccatcaccgacccgcaaccgacgtgctcttcgctgaaacgcgctgttcgtcgtggccacacacccgagtttgcgccggatccacgcttcagccagcggccaggccgtctggagtggcagcgccaacgcattgctgctggttctgtaatgggcctaccttggctcactactacggcttacacgtatgcgcacgtgtatgaggaagcgtaggtttcttttacttgagttaagtatactcgagatccacgagtatactttaaacaagataaagactccaagtagcgggttttggtaaaagatgagaactgctatttttgttttatgtttctgacttcctctaaatgtaatattctaaactaggaatctgccaacggctggttggcaggattctgctaacatgcaagtcactcattggctaaaagatgctgctttcagccaataggaatcctaaatgtgtatggaccacccgacgtggtggtcataaatgtatgtagccattggtgtgccttacaccaaggtcgaggaagtgttcgaacctctagcagacatcgcatctgttagagtaacaagtgactgtagccacttgtgcgtgtaaccccgttacaggttcggcgtagcggtcatcgaaccgacctcgtgcatcggggggtgcggtggaaagctgcgaggcgagctttggactgggtggtgcgatctggagcggctgtccagctgtacgcagggcataaagcggcggcattgcgggccgtcgcaagcaggcatgtaggtaggcgtgcaagaggaggtgagtcgaacaaagggttggacacaccggggattgaacccggggccttccgcttgcaaagcggacgcgctaccactgcgctatgcgcccagcaaaatggaaaacctaacctccatttttcggaccgctttgtcctcgcccctgcgcgcgctacgcacacaaacgcaccgcacgcgcactgccacggacacacgctacgccctgttgcccgccaatcgcattcaaacggcctccccgagcgacaccatcaccgacccgcaaccgacgtgctcttcgctgaaacgcgctgttcgtcgtggccacacacccgagtttgcgccggatccacgcttcagccagcggccaggccgtctggagtggcagcgccaacgcattgctgctggttcggcgtagcggtcatcgaaccgacctcgtgcatcggggggtgcggtggaaagctgcgaggcgagctttggactgggtggtgcgatctggagcggctgtccagctgtacgcagggcataaagcggcggcattgcgggccgtcgcaagcaggcatgtaggtaggcgtgcaagaggaggtgagtcgaacaaagggttggacacaccggggattgaacccggggccttccgcttgcaaagcggacgcgctaccactgcgctatgcgcccagcaaaatggaaaacctaacctccatttttcggaccgctttgtcctcgcccctgcgcgcgctacgcacacaaacgcaccgcacgcgcactgccacggacacacgctacgccctgttgcccgccaatcgcattcaaacggcctccccgagcgacaccatcaccgacccgcaaccgacgtgctcttcgctgaaacgcgctgttcgtcgtggccacacacccgagtttgcgccggatccacgcttcagccagcggccaggccgtctggagtggcagcgccaacgcattgctgctggttcggcgtagcggtcatcgaaccgacctcgtgcatcggggggtgcggtggaaagctgcgaggcgagctttggactgggtggtgcgatctggagcggctgtccagctgtacgcagggcataaagcggcggcattgcgggccgtcgcaagcaggcatgtaggtaggcgtgcaagaggaggtgagtcgaacaaagggttggacacaccggggattgaacccggggccttccgcttgcaaagcggacgcgctaccactgcgctatgcgcccagcaaaatggaaaacctaacctccatttttcgaaccgctttgtcctcgcccctgcgcgcgctacgcacacaaacgcaccgcacgcgcactgccacggacacacgctacgccctgttgcccgccaatcgcattcaaacggcctccccgagcgacaccatcaccgacccgcaaccgacgtgctcttcgctgaaacgcgctgttcgtcgtggccacacacccgagtttgcgccggatccacgcttcagccagcggccaggccgtctggagtggcagcgccaacgcattgctgctggttctgtaatgggcctaccttggctcactactacggcttacacgtatgcgcacgtgtatgaggaagcgtaggtttcttttacttgagttaagtatactcgagatccacgagtatactttaaacaagataaagactccaagtagcgggttttggtaaaagatgagaactgctatttttgttttatgtttctgacttcctctaaatgtaatattctaaactaggaatctgccaacggctggttggcaggattctgctaacatgcaagtcactcattggctaaaagatgctgctttcagccaataggaatcctaaatgtgtatggaccacccgacgtggtggtcataaatgtatgtagccattggtgtgccttacaccaaggtcgaggaagtgttcgaacctctagcagacatcgcatctgttagagtaacaagtgactgtagccacttgtgcgtgtaaccccgttacaggttcggcgtagcggtcatcgaaccgacctcgtgcatcggggggtgcggtggaaagctgcgaggcgagctttggactgggtggtgcgatctggagcggctatccagctgtacgcagggcataaagcggcggcattgcgggccgtcgcaagcaggcatgtaggtaggcgtgcaagaggaggtgagtcgaacaaagggttggacacaccggggattgaacccggggccttccgcttgcaaagcggacgcgctaccactgcgctatgcgcccagcaaaatggaaaacctaacctccatttttcgaaccgctttgtcctcgcccctgcgcgcgctacgcacacaaacgcaccgcacgcgcactgccacggacacacgctacgccctgttgcccgccaatcgcattcaaacggcctccccgagcgacaccatcaccgacccgcaaccgacgtgctcttcgctgaaacgcgctgttcgtcgtggccacacacccgagtttgcgccggatccacgcttcagccagcggccaggccgtctggagtggcagcgccaacgcattgctgctggttctgtaatgggcctaccttggctcactactacggcttacacgtatgcgcacgtgtatgaggaagcgtaggtttcttttacttgagttaagtatactcgagatccacgagtatactttaaacaagataaagactccaagtagcgggttttggtaaaagatgagaactgctatttttgttttatgtttctgacttcctctaaatgtaatattctaaactaggaatctgccaacggctggttggcaggattctgctaacatgcaagtcactcattggctaaaagatgctgctttcagccaataggaatcctaaatgtgtatggaccacccgacgtggtggtcataaatgtatgtagccattggtgtgccttacaccaaggtcgaggaagtgttcgaacctctagcagacatcgcatctgttagagtaacaagtgactgtagccacttgtgcgtgtaaccccgttacaggttcggcgtagcggtcatcgaaccgacctcgtgcatcggggggtgcggtggaaagctgcgaggcgagctttggactgggtggtgcgatctggagcggctgtccagctgtacgcagggcataaagcggcggcattgcgggccgtcgcaagcaggcatgtaggtaggcgtgcaagaggaggtgagtcgaacaaagggttggacacaccggggattgaacccggggccttccgcttgcaaagcggacgcgctaccactgcgctatgcgcccagcaaaatggaaaacctaacctccatttttcggaccgctttgtcctcgcccctgcgcgcgctacgcacacaaacgcaccgcacgcgcactgccacggacacacgctacgccctgttgcccgccaatcgcattcaaacggcctccccgagcgacaccatcaccgacccgcaaccgacgtgctcttcgctgaaacgcgctgttcgtcgtggccacacacccgagtttgcgccggatccacgcttcagccagcggccaggccgtctggagtggcagcgccaacgcattgctgctggttctgtaatgggcctaccttggctcactactacggcttacacgtatgcgcacgtgtatgaggaagcgtaggtttcttttacttgagttaagtatactcgagatccacgagtatactttaaacaagataaagactccaagtagcgggttttggtaaaagatgagaactgctatttttgttttatgtttctgacttcctctaaatgtaatattctaaactaggaatctgccaacggctggttggcaggattctgctaacatgcaagtcactcattggctaaaagatgctgctttcagccaataggaatcctaaatgtgtatggaccacccgacgtggtggtcataaatgtatgtagccattggtgtgccttacaccaaggtcgaggaagtgttcgaacctctagcagacatcgcatctgttagagtaacaagtgactgtagccacttgtgcgtgtaaccccgttacaggttcggcgtagcggtcatcgaaccgacctcgtgcatcggggggtgcggtggaaagctgcgaggcgagctttggactgggtggtgcgatctggagcggctatccagctgtacgcagggcataaagcggcggcattgcgggccgtcgcaagcaggcatgtaggtaggcgtgcaagaggaggtgagtcgaacaaagggttggacacaccggggattgaacccggggccttccgcttgcaaagcggacgcgctaccactgcgctatgcgcccagcaaaatggaaaacctaacctccatttttcggaccgctttgtcctcgcccctgcgcgcgctacgcacacaaacgcaccgcacgcgcactgccacggacacacgctacgccctgttgcccgccaatcgcattcaaacggcctccccgagcgacaccatcaccgacccgcaaccgacgtgctcttcgctgaaacgcgttgttcgtcgtggccacacacccgagtttgcgccggatccacgcttcagccagcggccaggccgtctggagtggcagcgccaacgcattgctgctggttctgtaatgggcctaccttggctcactactacggcttacacgtatgcgcacgtgtatgaggaagcgtaggtttcttttacttgagttaagtatactcgagatccacgagtatactttaaacaagataaagactccaagtagcgggttttggtaaaagatgagaactgctatttttgttttatgtttctgacttcctctaaatgtaatattctaaactaggaatctgccaacggctggttggcaggattctgctaacatgcaagtcactcattggctaaaagatgctgctttcagccaataggaatcctaaatgtgtatggaccacccgacgtggtggtcataaatgtatgtagccattggtgtgccttacaccaaggtcgaggaagtgttcgaacctctagcagacatcgcatctgttagagtaacaagtgactgtagccacttgtgcgtgtaaccccgttacaggttcggcgtagcggtcatcgaaccgacctcgtgcatcggggggtgcggtggaaagctgcgaggcgagctttggactgggtggtgcgatctggagcggctatccagctgtacgcagggcataaagcggcggcattgcgggccgtcgcaagcaggcatgtaggtaggcgtgcaagaggaggtgagtcgaacaaagggttggacacaccggggattgaacccggggccttccgcttgcaaagcggacgcgctaccactgcgctatgcgcccagcaaaatggaaaacctaacctccatttttcggaccgctttgtcctcgcccctgcgcgcgctacgcacacaaacgcaccgcacgcgcactgccacggacacacgcttcgccctgttgcccgccaatcgcattcaaacggcctccccgagcgacaccatcaccgacccgcaaccgacgtgctcttcgctgaaacgcgctgttcgtcgtggccacacacccgagtttgcgccggatccacgcttcagccagcggccaggccgtctggagtggcagcgccaacgcattgctgctggttcggcgtagcggtcatcgaaccgacctcgtgcatcggggggtgcggtggaaagctgcgaggcgagctttggactgggtggtgcgatctggagcggctatccagctgtacgcagggcataaagcggcggcattgcgggccgtcgcaagcaggcatgtaggtaggcgtgcaagaggaggtgagtcgaacaaagggttggacacaccggggattgaacccggggccttccgcttgcaaagcggacgcgctaccactgcgctatgcgcccagcaaaatggaaaacctaacctccatttttcggaccgctttgtcctcgcccctgcgcgcgctacgcacacaaacgcaccgcacgcgcactgccacggacacacgctacgccctgttgcccgccaatcgcattcaaacggcctccccgagcgacaccatcaccgacccgcaaccgacgtgctcttcgctgaaacgcgctgttcgtcgtggccacacacccgagtttgcgccggatccacgcttcagccagcggccaggccgtctggagtggcagcgccaacgcattgctgctggttcggcgtagcggtcatcgaaccgacctcgtgcatcggggggtgcggtggaaagctgcgaggcgagctttggactgggtggtgcgatctggagcggctatccagctgtacgcagggcataaagcggcggcattgcgggccgtcgcaagcaggcatgtaggtaggcgtgcaagaggaggtgagtcgaacaaagggttggacacaccggggattgaacccggggccttccgcttgcaaagcggacgcgctaccactgcgctatgcgcccagcaaaatggaaaacctaacctccattttttggaccgctttgtcctcgcccctgcgcgcgctacgcacacaaacgcaccgcacgcgcactgccacggacacacgctacgccctgttgcccgccaatcgcattcaaacggcctccccgagcgacaccatcaccgacccgcaaccgacgtgctcttcgctgaaacgcgttgttcgtcgtggccacacacccgagtttgcgccggatccacgcttcagccagcggccaggccgtctggagtggcagcgccaacgcattgctgctggttctgtaatgggcctaccttggctcactactacggcttacacgtatgcgcacgtgtatgaggaagcgtagatttcttttacttgagttaagtatactcgagatccacgagtatactttaaacaagataaagactccaagtagcgggttttggtaaaagatgagaactgctatttttgttttatgtttctgacttcctctaaatgtaatattctaaactaggaatctgccaacggctggttggcaggattctgctaacatgcaagtcactcattggctaaaagatgctgctttcagccaataggaatcctaaatgtgtatggaccacccgacgtggtggtcataaatgtatgtagccattggtgtgccttacaccaaggtcgaggaagtgttcgaacctctagcagacatcgcatctgttagagtaacaagtgactgtagccacttgtgcgtgtaaccccgttacaggttcggcgtagcggtcatcgaaccgacctcgtgcatcggggggtgcggtggaaagctgcgaggcgagctttggactgggtggtgcgatctggagcggctatccagctgtacgcagggcataaagcggcggcattgcgggccgtcgcaagcaggcatgtaggtaggcgtgcaagaggaggtgagtcgaacaaagggttggacacaccggggattgaacccggggccttccgcttgcaaagcggacgcgctaccactgcgctatgcgcccagcaaaatggaaaacctaaccttcattttttggaccgctttgtcctcgcccctgcgcgcgctacgcacacaaacgcaccgcacgcgcactgccacggacacacgctacgccctgttgcccgccaatcgcattcaaacggcctccccgagcgacaccatcaccgacccgcaaccgacgtgctcttcgctgaaacgcgttgttcgtcgtggccacacacccgagtttgcgccggatccacgcttcagccagcggccaggccgtctggagtggcagcgccaacgcattgctgctggttctgtaatgggcctaccttggctcactactacggcttacacgtatgcgcacgtgtatgaggaagcgtaggtttcttttacttgagttaagtatactcgagatccacgagtatactttaaacaagataaagactccaagtagcgggttttggtaaaagatgagaactgctatttttgttttatgtttctgacttcctctaaatgtaatattctaaactaggaatctgccaacggctggttggcaggattctgctaacatgcaagtcactcattggctaaaagatgctgctttcagccaataggaatcctaaatgtgtatggaccacccgacgtggtggtcataaatgtatgtagccattggtgtgccttacaccaaggtcgaggaagtgttcgaacctctagcagacatcgcatctgttagagtaacaagtgactgtagccacttgtgcgtgtaaccccgttacaggttcggcgtagcggtcatcgaaccgacctcgtgcatcggggggtgcggtggaaagctgcgaggcgagctttggactgggtggtgcgatctggagcggctatccagctgtacgcagggcatagagcggcggcattgcgggccgtcgcaagcaggcatgtaggtaggcgtgcaagaggaggtgagtcgaacaaagggttggacacaccggggattgaacccggggccttccgcttgcaaagcggacgcgctaccactgcgctatgcgcccagcaaaatggaaaacctaacctccattttttggaccgctttgtcctcgcccctgcgcgcgctacgcacacaaacgcactgcacgcgcactgccacggacacacgctacgccctgttgcccgccaatcgcattcaaacggcctccccgagcgacaccatcaccgacccgcaaccgacgtgctcttcgctgaaacgcgctgttcgtcgtggccacacacccgagtttgcgccggatccacgcttcagccagcggccaggccgtctggagtggcagcgccaacgcattgctgctggttctgtaatgggcctaccttggctcactactacggcttacacgtatgcgcacgtgtatgaggaagcgtaggtttcttttacttgagttaagtatactcgagatccacgagtatactttaaacaagataaagactccaagtagcgggttttggtaaaagatgagaactgctatttttgttttatgtttctgacttcctctaaatgtaatattctaaactaggaatctgccaacggctggttggcaggattctgctaacatgcaagtcactcattggctaaaagatgctgctttcagccaataggaatcctaaatgtgtatggaccacccgacgtggtggtcataaatgtatgtagccattggtgtgccttacaccaaggtcgaggaagtgttcgaacctctagcagacatcgcatctgttagagtaacaagtgactgtagccacttgtgcgtgtaaccccgttacaggttcggcgtagcggtcatcgaaccgacctcgtgcatcggggggtgcggtggaaagctgcgaggcgagctttggactgggtggtgcgatctggagcggctatccagctgtacgcagggcataaagcggcggcattgcgggccgtcgcaagcaggcatgtaggtaggcgtgcaagaggaggtgagtcgaacaaagggttggacacaccggggattgaacccggggccttccgcttgcaaagcggacgcgctaccactgcgctatgcgcccagcaaaatggaaaacctaacctccattttttggaccgctttgtcctcgcccctgcgcgcgctacgcacacaaacgcactgcacgcgcactgccacggacacacgctacgccctgttgcccgccaatcgcattcaaacggcctccccgagcgacaccatcaccgacccgcaaccgacgtgctcttcgctgaaacgcgttgttcgtcgtggccacacacccgagtttgcgccggatccacgcttcagccagcggccaggccgtctggagtggcagcgccaacgcattgctgctggttctgtaatgggcctaccttggctcactactacggcttacacgtatgcgcacgtgtatgaggaagcgtaggtttcttttacttgagttaagtatactcgagatccacgagtatactttaaacaagataaagactccaagtagcgggttttggtaaaagatgagaactgctatttttgttttatgtttctgacttcctctaaatgtaatattctaaactaggaatctgccaacggctggttggcaggattctgctaacatgcaagtcactcattggctaaaagatgctgctttcagccaataggaatcctaaatgtgtatggaccacccgacgtggtggtcataaatgtatgtagccattggtgtgccttacaccaaggtcgaggaagtgttcgaacctctagcagacatcgcatctgttagagtaacaagtgactgtagccacttgtgcgtgtaaccccgttacaggttcggcgtagcggtcatcgaaccgacctcgtgcatcggggggtgcggtggaaagctgcgaggcgagctttggactgggtggtgcgatctggagcggctatccagctgtacgcagggcataaagcggcggcattgcgggccgtcgcaagcaggcatgtaggtaggcgtgcaagaggaggtgagtcgaacaaagggttggacacaccggggattgaacccggggccttccgcttgcaaagcggacgcgctaccactgcgctatgcgcccagcaaaatggaaaacctaacctccatttttcggaccgctttgtcctcgcccctgcgcgcgctacgcacacaaacgcactgcacgcgcactgccacggacacacgctacgccctgttgcccgccaatcgcattcaaacggcctccccgagcgacaccatcaccgacccgcaaccgacgtgctcttcgctgaaacgcgttgttcgtcgtggccacacacccgagtttgcgccggatccacgcttcagccagcggccaggccgtctggagtggcagcgccaacgcattgctgctggttctgtaatgggcctaccttggctcactactacggcttacacgtatgcgcacgtgtatgaggaagcgtaggtttcttttacttgagttaagtatactcgagatccacgagtatactttaaacaagataaagactccaagtagcgggttttggtaaaagatgagaactgctatttttgttttatgtttctgacttcctctaaatgtaatattctaaactaggaatctgccaacggctggttggcaggattctgctaacatgcaagtcactcattggctaaaagatgctgctttcagccaataggaatcctaaatgtgtatggaccacccgacgtggtggtcataaatgtatgtagccattggtgtgccttacaccaaggtcgaggaagtgttcgaacctctagcagacatcgcatctgttagagtaacaagtgactgtagccacttgtgcgtgtaaccccgttacaggttcggcgtagcggtcatcgaaccgacctcgtgcatcggggggtgcggtggaaagctgcgaggcgagctttggactgggtggtgcgatctggagcggctatccagctgtacgcagggcataaagcggcggcattgcgggccgtcgcaagcaggcatgtaggtaggcgtgcaagaggaggtgagtcgaacaaagggttggacacaccggggattgaacccggggccttccgcttgcaaagcggacgcgctaccactgcgctatgcgcccagcaaaatggaaaacctaacctccatttttcggaccgctttgtcctcgcccctgcgcgcgctacgcacacaaacgcaccgcacgcgcactgccacggacacacgctacgccctgttgcccgccaatcgcattcaaacggcctccccgagcgacaccatcaccgacccgcaaccgacgtgctcttcgctgaaacgcgttgttcgtcgtggccacacacccgagtttgcgccggatccacgcttcagccagcggccaggccgtctggagtggcagcgccaacgcattgctgctggttctgtaatgggcctaccttggctcactactacggcttacacgtatgcgcacgtgtatgaggaagcgtaggtttcttttacttgagttaagtatactcgagatccacgagtatactttaaacaagataaagactccaagtagcgggttttggtaaaagatgagaactgctatttttgttttatgtttctgacttcctctaaatgtaatattctaaactaggaatctgccaacggctggttggcaggattctgctaacatgcaagtcactcattggctaaaagatgctgctttcagccaataggaatcctaaatgtgtatggaccacccgacgtggtggtcataaatgtatgtagccattggtgtgccttacaccaaggtcgaggaagtgtagctgtgagattccgagcactgaagctcgacaagaatgcaatgatttctgttttataacgactgggcttcgacccaaaccagtgagtttgcctaaagaaaagtagtcgaatttgggttcaacatcaaaatccaagttggccaagtagatattactacagtttaccgtagctagcgacacggcttgtcaaaaaatagttaatcaacttcttcttcatacgaaagcatcatggccgcggtacagcattcaccctgaaacacgtgcgctcacgctgggcgagaagaactacatgtgcgctcgcattcctgtcgaggggatccaacgaacgacagattcgccaaatgtcaacacaccagtgaaaggtgattttccgtagtgatgtgtgaagagcagggaatgaataattcaatttgtttgcacaacgtctgggcgtacgttgtactgtataaacttttgttgcatacaaaagcgacactgcgtgttgtgtgtatgccatatcgtgtcccgggttaggggcatttttcgcagagcagactactacttccgaattacttcgattttgcgttggccatgctcgagcatttaaactgtcatttcgaccttttcattctgtcatgggtcataactcatattataccctcctctttcagacacgcgagaagatgatttcaccttgcgatcgattttcttctgtatggatagttaatcagagagattaactgaaaatcttgtgcaattttcgtggcatacattgttgacaggctggtattgtgtgaatccccacacgtattgaaatgcgtttaggtgtattagattgaacattccactgagacttcgccaaaaactacttcaattatttttaacgatatgtgatccaaaatgggaggtatatcttgagttttccgctcaacgattttgtatccaatgcaaacgctatctagcagagagccaaagagctgcacccgatggtacgtcttctccggagaaaaggctagaagctagcgcaaaaagaataacgaccgtgtatgaaactggaaggaacctagttcaaattaatcgagctaggaatggctcatgtgggtccattaaaaacctagctgctgtcgctcaggcatttaatctacaaagactttggttggtattattcttgctttgtgtgagactacattgcgaccagcagggattccccgagctcatttactactggtggtgtattaatacaattatgcactacttgatcctgttcttgtcaaacaacttcgaagtacaccgttaccgatgttagtttagaacatcctaatgctacatgaatacggtacgaccagcttaatacttgataaatggcaatggcataattggacgaattgaagcagacacgggttttgttgttagatattcaggcgacccggacgaaatatgtgtgtgactgcgccatgttgtatcaaacagctttttaatgcttctaagttacgtcgtcgctgtacgccccgaattcctgcgcgagaggaagcccgagcggacagtatcaaagcgaagggcaaatacccggtgtatcctgctcctacaggcgatcgagatctgctagacctcagttttgacgtatcaaatttgaaacaaattgctggcttcatccgttttcccagcaggttcagttgagcaattagcctggcagcgctaaatcttcaaatacacggattttcttcttttgtctcctccggtaagtttccgagcaagacacggaaaaaggttctgcctaggcatcagcgcacatttcagtggcaggaaggaaggaaagtacgttgattagctagttgtcgatgatcgttctgctaagtacaaaagaactaaaattaaaactaaatccgtgaaatattgatccgacgagcaggagaagcccgaagcgttgaagtaccaactcaactaaactctgcgtttttcaatccatcggagtgacgatatatactgtagactgtcaatgcctttgaaaagaagcggtcaaacttggtnnnnnnnnnnnnnnnnnnnnnnnnnnnnnnnnnnnnnnnnnnnnnnnnnnnnnnnnnnnnnnnnnnnnnnnnnnnnnnnnnnnnnnnnnnnnnnnnnnnnnnnnnnnnnnnnnnnnnnnnnnnnnnnnnnnnnnnnnnnnnnnnnnnnnnnnnnnnnnnnnnnnnnnnnnnnnnnnnnnnnnnnnnnnnnnnnnnnnnnnnnnnnnnnnnnnnnnnnnnnnnnnnnnnnnnnnnnnnnnnnnnnnnnnnnnnnnnnnnnnnnnnnnnnnnnnnnnnnnnnnnnnnnnnnnnnnnnnnnnnnnnnnnnnnnnnnnnnnnnnnnnnnnnnnnnnnnnnnnnnnnnnnnnnnnnnnnnnnnnnnnnnnnnnnnnnnnnnnnnnnnnnnnnnnnnnnnnnnnnnnnnnnnnnnnnnnnnnnnnnnnnnnnnnnnnnnnnnnnnnnnnnnnnnnnnnnnnnnnnnnnnnnnnnnnnnnnnnnnnnnnnnnnnnnnnnnnnnnnnnnnnnnnnnnnnnnnnnnnnnnnnnnnnnnnnnnnnnnnnnnnnnnnnnnnnnnnnnnnnnnnnnnnnnnnnnnnnnnnnnnnnnnnnnnnnnnnnnnnnnnnnnnnnnnnnnnnnnnnnnnnnnnnnnnnnnnnnnnnnnnnnnnnnnnnnnnnnnnnnnnnnnnnnnnnnnnnnnnnnnnnnnnnnnnnnnnnnnnnnnnnnnnnnnnnnnnnnnnnnnnnnnnnnnnnnnnnnnnnnnnnnnnnnnnnnnnnnnnnnnnnnnnnnnnnnnnnnnnnnnnnnnnnnnnnnnnnnnnnnnnnnnnnnnnnnnnnnnnnnnnnnnnnnnnnnnnnnnnnnnnnnnnnnnnnnnnnnnnnnnnnnnnnnnnnnnnnnnnnnnnnnnnnnnnnnnnnnnnnnnnnnnnnnnnnnnnnnnnnnnnnnnnnnnnnnnnnnnnnnnnnnnnnnnnnnnnnnnnnnnnnnnnnnnnnnnnnnnnnnnnnnnnnnnnnnnnnnnnnnnnnnnnnnnnnnnnnnnnnnnnnnnnnnnnnnnnnnnnnnnnnnnnnnnnnnnnnnnnnnnnnnnnnnnnnnnnnnnnnnnnnnnnnnnnnnnnnnnnnnnnnnnnnnnnnnnnnnnnnnnnnnnnnnnnnnnnnnnnnnnnnnnnnnnnnnnnnnnnnnnnnnnnnnnnnnnnnnnnnnnnnnnnnnnnnnnnnnnnnnnnnnnnnnnnnnnnnnnnnnnnnnnnnnnnnnnnnnnnnnnnnnnnnnnnnnnnnnnnnnnnnnnnnnnnnnnnnnnnnnnnnnnnnnnnnnnnnnnnnnnnnnnnnnnnnnnnnnnnnnnnnnnnnnnnnnnnnnnnnnnnnnnnnnnnnnnnnnnnnnnnnnnnnnnnnnnnnnnnnnnnnnnnnnnnnnnnnnnnnnnnnnnnnnnnnnntgcggtggaaagctgcgaggcgagctttggactgggtggtgcgatctggagcggctatccagctgtacgcagggcataaagcggcggcattgcgggccgtcgcaagcaggcatgtaggtaggcgtgcaagaggaggtgagtcgaacaaagggttggacacaccggggattgaacccggggccttccgcttgcaaagcggacgcgctaccactgcgctatgcgcccagcaaaatggaaaacctaacctccatttttcggaccgctttgtcctcgcccctgcgcgcgctacgcacacaaacgcaccgcacgcgcactgccacggacacacgctacgccctgttgcccgccaatcgcattcaaacggcctccccgagcgacaccatcaccgacccgcaaccgacgtgctcttcgctgaaacgcgttgttcgtcgtggccacacacccgagtttgcgccggatccacgcttcagccagcggccaggccgtctggagtggcagcgccaacgcattgctgctggttctgtaatgggcctaccttggctcactactacggcttacacgtatgcgcacgtgtatgaggaagcgtagatttcttttacttgagttaagtatactcgagatccacgagtatactttaaacaagataaagactccaagtagcgggttttggtaaaagatgagaactgctatttttgttttatgtttctgacttcctctaaatgtaatattctaaactaggaatctgccaacggctggttggcaggattctgctaacatgcaagtcactcattggctaaaagatgctgctttcagccaataggaatcctaaatgtgtatggaccacccgacgtggtggtcataaatgtatgtagccattggtgtgccttacaccaaggtcgaggaagtgttcgaacctctagcagacatcgcatctgttagagtaacaagtgactgtagccacttgtgcgtgtaaccccgttacaggttcggcgtagcggtcatcgaaccgacctcgtgcatcggggggtgcggtggaaagctgcgaggcgagctttggactgggtggtgcgatctggagcggctgtccagctgtacgcagggcataaagcggcggcattgcgggccgtcgcaagcaggcatgtaggtaggcgtgcaagaggaggtgagtcgaacaaagggttggacacaccggggattgaacccggggccttccgcttgcaaagcggacgcgctaccactgcgctatgcgcccagcaaaatggaaaacctaacctccatttttcggaccgctttgtcctcgcccctgcgcgcgctacgcacacaaacgcaccgcacgcgcactgccacggacacacgctacgccctgttgcccgccaatcgcattcaaacggcctccccgagcgacaccatcaccgacccgcaaccgacgtgctcttcgctgaaacgcgctgttcgtcgtggccacacacccgagtttgcgccggatccacgcttcagccagcggccaggccgtctggagtggcagcgccaacgcattgctgctggttctgtaatgggcctaccttggctcactactacggcttacacgtatgcgcacgtgtatgaggaagcgtaggtttcttttacttgagttaagtatactcgagatccacgagtatactttaaacaagataaagactccaagtagcgggttttggtaaaagatgagaactgctatttttgttttatgtttctgacttcctctaaatgtaatattctaaactaggaatctgccaacggctggttggcaggattctgctaacatgcaagtcactcattggctaaaagatgctgctttcagccaataggaatcctaaatgtgtatggaccacccgacgtggtggtcataaatgtatgtagccattggtgtgccttacaccaaggtcgaggaagtgttcgaacctctagcagacatcgcatctgttagagtaacaagtgactgtagccacttgtgcgtgtaaccccgttacaggttcggcgtagcggtcatcgaaccgacctcgtgcatcggggggtgcggtggaaagctgcgaggcgagctttggactgggtggtgcgatctggagcggctgtccagctgtacgcagggcataaagcggcggcattgcgggccgtcgcaagcaggcatgtaggtaggcgtgcaagaggaggtgagtcgaacaaagggttggacacaccggggattgaacccggggccttccgcttgcaaagcggacgcgctaccactgcgctatgcgcccagcaaaatggaaaacctaacctccatttttcggaccgctttgtcctcgcccctgcgcgcgctacgcacacaaacgcaccgcacgcgcactgccacggacacacgctacgccctgttgcccgccaatcgcattcaaacggcctccccgagcgacaccatcaccgacccgcaaccgacgtgctcttcgctgaaacgcgttgttcgtcgtggccacacacccgagtttgcgccggatccacgcttcagccagcggccaggccgtctggagtggcagcgccaacgcattgctgctggttctgtaatgggcctaccttggctcactactacggcttacacgtatgcgcacgtgtatgaggaagcgtaggtttcttttacttgagttaagtatactcgagatccacgagtatactttaaacaagataaagactccaagtagcgggttttggtaaaagatgagaactgctatttttgttttatgtttctgacttcctctaaatgtaatattctaaactaggaatctgccaacggctggttggcaggattctgctaacatgcaagtcactcattggctaaaagatgctgctttcagccaataggaatcctaaatgtgtatggaccacccgacgtggtggtcataaatgtatgtagccattggtgtgccttacaccaaggtcgaggaagtgtagctgtgagattccgagcactgaagctcgacaagaatgcaatgatttctgttttataacgactgggcttcgacccaaaccagtgagtttgcctaaagaaaagtagtcgaatttgggttcaacatcaaaatccaagttggccaagtagatattactacagtttaccgtagctagcgacacggcttgtcaaaaaatagttaatcaacttcttcttcatacgaaagcatcatggccgcggtacagcattcaccctgaaacacgtgcgctcacgctgggcgagaagaactacatgtgcgctcgcattcctgtcgaggggatccaacgaacgacagattcgccaaatgtcaacacaccagtgaaaggtgattttccgtagtgatgtgtgaagagcagggaatgaataattcaatttgtttgcacaacgtctgggcgtacgttgtactgtataaacttttgttgcatacaaaagcgacactgcgtgttgtgtgtatgccatatcgtgtcccgggttaggggcatttttcgcagagcagactactacttccgaattacttcgattttgcgttggccatgctcgagcatttaaactgtcatttcgaccttttcattctgtcatgggtcataactcatattataccctcctctttcagacacgcgagaagatgatttcaccttgcgatcgattttcttctgtatggatagttaatcagagagattaactgaaaatcttgtgcaattttcgtggcatacattgttgacaggctggtattgtgtgaatccccacacgtattgaaatgcgtttaggtgtattagattgaacattccactgagacttcgccaaaaactacttcaattatttttaacgatatgtgatccaaaatgggaggtatatcttgagttttccgctcaacgattttgtatccaatgcaaacgctatctagcagagagccaaagagctgcacccgatggtacgtcttctccggagaaaaggctagaagctagcgcaaaaagaataacgaccgtgtatgaaactggaaggaacctagttcaaattaatcgagctaggaatggctcatgtgggtccattaaaaacctagctgctgtcgctcaggcatttaatctacaaagactttggttggtattattcttgctttgtgtgagactacattgcgaccagcagggattccccgagctcatttactactggtggtgtattaatacaattatgcactacttgatcctgttcttgtcaaacaacttcgaagtacaccgttaccgatgttagtttagaacatcctaatgctacatgaatacggtacgaccagcttaatacttgataaatggcaatggcataattggacgaattgaagcagacacgggttttgttgttagatattcaggcgacccggacgaaatatgtgtgtgactgcgccatgttgtatcaaacagctttttaatgcttctaagttacgtcgtcgctgtacgccccgaattcctgcgcgagaggaagcccgagcggacagtatcaaagcgaagggcaaatacccggtgtatcctgctcctacaggcgatcgagatctgctagacctcagttttgacgtatcaaatttgaaacaaattgctggcttcatccgttttcccagcaggttcagttgagcaattagcctggcagcgctaaatcttcaaatacacggattttcttcttttgtctcctccggtaagtttccgagcaagacacggaaaaaggttctgcctaggcatcagcgcacatttcagtggcaggaaggaaggaaagtacgttgattagctagttgtcgatgatcgttctgctaagtacaaaagaactaaaattaaaactaaatccgtgaaatattgatccgacgagcaggagaagcccgaagcgttgaagtaccaactcaactaaactctgcgtttttcaatccatcggagtgacgatatatactgtagactgtcaatgccttttgaaaagaagcggtcaaacttggtacacttggttgtacagtcctaggcagatgctgcggctgcgaagcaggcgcaggagatgcccgaatccatggtttccctctacaagtatccgtgcaagctagcttcgaactgcgaacccccccgggtctaccacccgggtccccaatcggcactgttgattggtagaaacccaactgaatgtgaatgcatgcggaggtggggggggcatgggtaccaagtttgagaggagacttctgaagtaatatggcgaactatgagccatcagtgctggcaaatgcgctttggagtctataactttcgcttggaccctttgcttacctagatgatataggtgcgggctgtaccaaactaacgatttctccaatatcaccatatcctggaaaattcttttttttgattttcggaaaatatttacttagtcaatatttattgtggctttcatccaaatcatatatcttgctggagggctccgatttagcaggaggggctgagggaagcaaactctatctggcccgatttgcgtctgggggctgcgagttgcgaagcaggggccagaaatgccgcttttcgccggcaaaagggaccgccgcgaaaatatgtctggggccctctcagatcgaggttgtagcggccgtagatgatcacacaggtgatttagctggccatagtgctatgaagtggctatatacagtgtactattgtccccaatgtcttgcagttctaatgcgtcatgagaggtgaggaagtatggccactggccatacctcctcacctcacaagctggccaatggccagcttggaatgcctcccctctgagccttatgctactaactcaggccagatatagcatttaattggactaaccgatcatgtaggagctccattttatataaatcggactccgagataacacgtcaaatcgggcggcaaaatatttgaaaaccacaatattacaaatttttgagtgaccccacaaattatccttttccggttgttgcttttttaaaaaaaagcgcaaatcaggttaaaaccttctaaaatctctggtagtgaaagggttaaaacgcaaaagggacagaattgagggtcgcaatgcacggcgtggagcccacgcgccctgagcagcgactcgctgctcgcgcacttcaactggccaggtgggcaaccgttttaatctgcacgcagctaaaccggaggtttacgtatggtagatagagttcccaccgactggcatcgactggtgacagccgcgccgtggtcccttttgactcggccgctgctgggatggccggtctcacgcgctttgaagcgtgaccacgatgatgctcgcgatcggcggagtcgattcgagcctggccgccgccaaccgctcgttcctggcagcccagcagcgagtcgctggcgtagcgatcccccctccccacctttaatcaccgtcgcgctttggctgcgttagcgccgagtcgccggccgagcgatacaccaaagcgagggccgcgtcaaaccgactcagtctccgctggaagagttgaccgctcgcggatgatgcgctcccactctatgaaccatcgccaccgctgaacacgcaccagcgattgacaagcaagagatccccatgctctcgctcgctgcgccggccctggcggcggcgtggcctgctgatcaggcgtgtccacgggatccgctgctctcttcgcttgtctccgcctgccccagctgtgcaatgcgcgcacacctagcgaaactcggcgcccgcaagtcctgcgtgacggcggctggccgagcgcggctcgctctctgcacggcgcggggttctttttcgttcacgcgtcgcgcgtcgcactcccctccgtgttggtgccatctttgcatcatctcatcgggcagatcggtggtcccggccgccgccagcagctccgggctcattcctcgttttgcgtcgactcccgtacttcgcccttcccgtcctctccgtcgtcgagcttccgccatggacagccagcacctgcaggacctggagaagtcgtcgccaaaggcggcctacgccaagctggacggcgacgtgccggtccgcgcctcggagcagccccagaacttcgaggacggcaactcgctctacgcgcggctgcagcgctgggccggcaagctcaagatcgagcagcgcggcatcgagcgcgtgcccgaggacgagcgccacgacgactcgctgctgaacgtgggcagcatgtggctggccgccaacatggtcatcagctccttcgccatcggcgtgctgggcaagtcgctgttctacctgggctcggccgacgccttcctggtcgtgctcttcttcaacatggtgggcatcctgcccgtgtgctacttctccacgttcggccccatcttcggcctgcgccagatcgtgctctcgcgcttctggtacggctggcacggtgtcaagatcgtggccgtcttcaacgtgatcgcgtgcctcggctggtcctgcatcaacgtcatcgtgggcgcgcaggtcatcaacgccgttaacaacgacgtgcccggttgggccggcatcatcatcatcaccgtctgcaccttcatcgtcacgctcttcggctacaaggtggtgcacgcgtacgagttctggtcctggatcccggccttcatcgtcttcatgatcgtgctcatcgagttcgccatctcgggcgcctacgtcaacatccccatgggcacgggcacgtccgaggtcggcagcgtgctgagcttcggcgccaccgtgttcggcttcgccatcggctggacgtcctacgcggccgactacacggtgtaccaccccgtgaaccagagcaagctcaaggtcttcctgtccgcgtacgccggcctgatcgtgccgctgctcttcacgcagttcctgggcgtggccgtcatgacggccacggacgagagcaacccggacagcaagtaccgcgacggctacaacgaggccggcgccggcggcctcatcagcgccgtgatcgtgggcccgctgggcggcttcggccagttctgcctcgtgctgctggcgctgtccatcatcgccaacaactgccccaacatctactcgttcgccatcaccgtgcaggtcttcggcgagtggacgcgcgccatcccgcgcttcgtatggacgctcgtgggctcggtcatctacgcggtcgtggccttcccgggctactcgcacttcgagagcgtgctcgagaacttcatgaacgtcatcggctactggatgtccgtgtacgcggccatcggcctcaccgagcacttttacttccgccggggctactcgggctacaacccggccgactacgacaaccgcgacaagctgccgcacggcatcgccgccgtcttctccttctgcgtgggcatcgtcggcgccgtgctgggcatgagccagacgtggtacgtcggccccatcgccaagctctgcggcgaggccccgttcggcggagacgtcggcgtggagctcgcttgggtcttcgccatcgtgtcgtacctcgtcacgcggcccatcgagctgcactacttcggcaagtaagcgcctcgaccccggtgactccgacatattagtcgctgccatacctcctacctatttgtcaatcagtagacccagctgcgaagacccgcagctaccataccctcttgctctggtcttgctccttgagccaacatcccgccaaaagcggggagcatcgaaaccttgtaacattagaaaaccatgagaaagttttacccaacaacgcaaaaactataataggataaccttgcaaagtgctgacagggcgactgacgatcatcctatgcttgagacagctcggcaagtattgccgatcacggcgttcttggaacatactacagtagtataaagacttggtgtcggtgtcggtgtaccggtagctgcacccggaacccaatgtccgctaacgatgcgcctgaagtgaatttgctggcgccatgcccacgttgcctcggactcaagtccgaaaagttttcggcgaaaaccggcgtttgcacccaaatcgaatcaacttcaacgtgctgcactcttcaatggtaccgggctatctccttcaccactgccatttccaaacttgtccggcgttgctcaagtccgtcttaaccaagcagccacttcaccaagtttccatgcgtcaactcgcctcgctgctcactgtcgtcgccttcaccctggcgccactcggagctctcgccgccgaatgcaccgacgcggaggtggcccacgacgacgagctgtgggcctgggccgcaacgcaatcggcctgtgcgccgtacgcctcgggcacctcgtacttcaactggccctgcgacgccagtgactgcacggcgatcttggcgagtatggccgcctccatgtcggactgcacgtacagcggcgtgagcaacaagatcgaggtgcagaacgccatcacagtctgcaccgggggagacaccacggacccaggctccccaagcaccgacaccccgtcgacgactgctccatccccaacggcgacagcttccaacacggactgtgcggcctcggagatcagcgacatggtggatctgtacacggccgctgcttccagtgacgagtgtgcggacgactcgagcgtctcgagctccagcatcgtcatcacgacgttctgcggctcggcgtgcgcctcaaagctcgaggagctggccacttcgctgcccaattgctactacgggtaccagtctgaaaacctgaaggcggacttgctggagcagctcgatggatgctctggggaggacacttcctacgccatcaacgtcgtccttaacccagaggaggcgatggaagcaccggcaaccacaaccagtcctccgacgactacacaaagccctccatctacgacgagtccacctgactcgaccactgcgcccgacaccaactccacctcggagccgactcctgcacctaccgaaggtgactcgggggcttactgctgaatgggctctgcccccttcaagcgggccctgctctctcaaaagctacctacgctcgtagttatcaattctactctttcatatcagcatcaaacaaccgagagagacccctgtgcgtatcacaattccatgggatttacaaacaaaatcgacgctacctgcttacaattataccagcttcttgatcgtccgtagtgcgtacaccagctccgacgcggcaggacgcacgcgcggattcttggcgagacaggaatcggccagcgacctcaaatctgacgggcagtcctcaccgaacctgaggcggatggagcctgcagcgatcatctgaagcaccaccgcctcggccaactgagtgccgctcagacttcgagcgtcattgtagggcggcgcatgggtgtccagctcggacagcagcacgccaaagctgaagatgtcgactgccgggtcacggtcgtctgagcccatcaagacttccggcgcttgccacggacccataacactttgctggtccttgtcgccgctagcaagcgccctcagatgggatacgccgaccttgctcactttggccttcatctcgctagtaagcagcacgttgctcgccctcagatctcggtgcagcacaggaggcgcgaacgagtgaaggtagaccagagcttccgccacctccaaggcgatctgcagcttttgttgggtccactcacgcagcgtaccgggtctggtcaggtagtcggtcacgtttccgttgtccacgtactcgtacagagcttggatgtcggtcttgactgtccacgcgattccgacgagcttcaccacacttgggtggtccagcggagcggccagcttgatctcttcgatgaaggccttggtgattcgtcgacgggccaagtccttccgaaggcgctttgaggccaacaactgcgacttgcggtatctgacgagccacacgacacagtggccaccagcaccgatcttcttgacgttcttgatgtcccccggcttcaacatgaggggcacgagttgcgggtcgtccagctccgccgtgatgaacttcacagcccggcgacgtcgacggcatacgcagatcacgagtacgagaagaatcaggattaaaacagccccacctgcggtgattgcgataatgaccccagtcgctatccctccactgcttgaatctgttgttgtagtagccacgggtgctgctgatgtcaggcagactggaatcgtgttgcgaagtagctgagtgttgttcgtctggcaagctggttgggtgtcgaagtcggcttcagtgacgtccaacgtatccagactttgcaaaaactggaattggctgtcagtgaatattggcgacaagagggacgaaccactaccggaaagatacctgttcatcgcacatgaggaagaggtgaattaggttcaccaaagtctggagacaagtagcatctcacagtacgtacaagctcttgagctttgtgcaattgtacacagccgctggaatcgcggtcagattgttgccacccaaatatctaaaaagaagcttcgtaagaaccaacacaaggacagcagagcaaggcaagaaccacgtacaggatttccaggtttgggtacgttgcctcaaaggccacgatgttgttgtcactcaaattcctgaacagtgcaaaacattcgcacccaaatgatcagtgaacacgaacagactcaagtcgcatggcaaagcttaacgtacagcgctgtaagtgtatcggaaaagtttaacgcgctgacttcttcgatcttgttggagcctaagtttctgtcgaaaccccacattcggttagatagtacgcaatcaaaggttttattcatcgcccagtacttacagggtctccagattttcgtggttcttgagtgattcaggcatggttgtaaggttgtttgacgcaagatttctgaccaaaccaaagaaaacgaacgtaagcccttgcaacacatatttaggcagctcaaaccacgtacaaattcttcagagtgggtatcacgtcagattcgttgagactcgatatgtagttcccctccagtgatctgaatccgataccaaggaaaataattagatcgcgatagcagccacagcatcacgaagtcgcagagataccaacagtttttcaagcttcgggagcgccgtgagttgagtcgggaacgcgtagatcaacgtatttttcagatccagctgcgtggtgttcaccggcagcttcgacggtaagtcgtgcaaaacgtccttcaggttgaggttgatgagcgacaccctcgtgatttgggactgattggcaatgaagtccgagttgagcgtgaggtagcccactcgacctttgtagtagcctctgtagctgttacccccggcaagcaccctgcagttcaaccaacatccgcatcacttgttaggttagagacattgccaacagacggggaacaccaacacttacacttgatcaatgtccgagttgatctcaagtttagagacgtcgtacaggtagcagttgtcgacatgagggtatacctcggtgtcgtccggaagctcgacaaccttcgacacgtacgacgcatcggccactcgtgcagctgcgtcctcgtcgctttggtagccagagtctcggatgaggaggacaaacgccgagtccgtgtagttgaagcaggtgtagtccccgtcgacagctacgtcgcagagcagtccgccactgcattggccactgcacgacgacagaagggtgcctccaccccacagacccgacgagttcatgcatatgggcggcgtcattgccatcacctgcaccgtccagagagacgcgagcgctaatagccacctccaggtcattgtgctattgagactttcacgctgcggcgtcgttaggacaatgacccctcgcagctggatccagcgatgggttaggaaattcgtgcgtgcatccagccatcgagtgaccgggagacctctacgtccctgtcatcctcacgaagagcgcctcggtgaatccagaagtctggatttaactagctgtcaactaacgttccccgcaacgccatgtagccaaactcctgggtggcatggcgccgatggacggacagttttcagtcacgatcttacgccacgcacgacaaggggcatgttagtccagactcgcagagtggttgcccgagaaaatgaggttcgtgcccgacacctgttcgtggatacaggatactgatggaaatgagttggcgcgggggggggggggggggctgggcatggtcggatcgtgctttcgagtacatagacttcatatgagctgcgctgcaacaacttgcaactattgactccaccctaatggcgttccgtgtattagattgcacgtgtgtgcccagatacatgtgtattgtgctcctcttgtctccgccaggaggcgatatccgttaatttcagcagcctcacgttacacaattatcaagcgactgctgctgcaggcaacttccactgctcgtatttcttcagcactagcaggatgacgtcggacaactctgctgctacacctgaagtagatctgctggtgctattgtcgcccatggacgctgtcttgctgagctacggcttcgctgtgatctacgtgttcccggcgcctgcggattgtactggggcttttaatctccagaagctggacgcctcttttcaagagttggtgaatgaagactaccgatttctcgttggaaacgtgcaagtggatgatgccactggtcgtgtgagtgtgctacagacccctaaggctcgacgacaaggcgcagcaggtctccgcttcgagcaccagccaaagagctcactaacctcggatgaggtggttgcatctcttgagtggagttccatgccttcgaaactggagaagtacgagacgattgcaattcggtgcacgccactcgcggacggtggggtggctatcggaatcacgctgaaccatactctgatggacggagaaggtctcttcaccttcatgcgagcatgggggcaactctatagtggagtagccaaagaacacagactcgtaatcaaccaccaccgacacttgctctccggaacggggcgaggatcgcaacgacctcaccccgcaataaagattgtgcctccaccaagtggagaaacaatcccgatttcccaccacacagcacgctttccacgtctcaaggaaaagcatatccaagctcaaggcacttgcacgtactgcaagtgaaagatacatcgctgatccgcccttcgtcagtacaatcgacatcatcacggctctcttcgttgtgctgagctcacgagcgcgagggcacggccaagacgttcgaatcacgacgggtgtgaatgctcgacggcgactcgaccccccattgcccacgaattacgcaggcaactgcgtcttcagcgccttatcgacctacagcaaagaggaactgcagccagagacggaagttgacgacgctgatatcaaccccgtcactctgattaaactcgctcgtcgagttcgtgcgtccatcttggagcttgacgatgaatttttgcgcgacgcaattgaatttatcgctgaacaggaacatctctcacgcgtcgtcgtgagcaccaagtacatcctcggacctgacctcatgttcacctcgtgggccaacatgggtctgtacgacgccgacttcaacggcactcgtccatgctacgctgggattgccaaggtcccattcctggacggtatggtggtcattgcggaagctgccaaaggagctgacggactggatgtgctggtgtttctcgagcgcgctgccatggagaggctcaaggtgctgtgggggcaagtctcgcacttactggactagggtgctctttgtggactgaagacaggtgagagctagagagacattccacgtcaactgagcctcagcattttcttacttgggacgctttggcaccgggcaagcagcagtgggttttcgctgcagactcaatcagacggcattttacctgtgttttctcctcgatgaagcttaaatttcctttagctaaatacatcacgccggtgcagatcctctggccttgtccagggtggcgataccgaacgtgacgtctttcctaagtcttaaataagacttttgtgcaattactcggaagtcaccgaagtgtactcgaaattaagtagcacgcagtgccggactccgtctttatctctgtatgcgacgtctgcttcctctacaatccgtttaggtctacaatccgtttaggaggcgatttgcggcagcctctacgttgttgtccgtggactgaagtgcttgcagcgcgcgctctctatcaaagccgagggcctgcaattccaaccacgaaccaagtgagttagctcatctacatcgtgcctgcatcgacgaatgggaaattcgtaccattagctgctgaatggcgtcttcagacggtggtgcagccgcgagatggggtggcagtatgcctcccgccgcggcggctgcagcaggaacgccaccaggcatcatgccccctgcgcccggcagtaactggtcccggaagccttgtccttccacagccggcgcagcagggcggccccgattaaaccgcgcattcaatcgacgctgagcttcgagcgcacgccgctgtcgctgaagagccaaggtactcgcaggaaccacgtcgaacagcgggtggaacaggccgaaaatcgagcacacaaacgacggcagtcgtagtcgtccaagtggcgtcgagctgaataggagcccaaagaacgatccgcccaggaacggaatcagcgcgtgatagtcacgtgccagtatctaacacagcagtataacacacaagcaaccaattcgttagtttatccgcataaccttcccaactcaacaaaagcgccagcatctccatcgtaccaccagcatgagcaaatacgtgctcgacttgtccgaaaagtgcaacccacccacactcagcgatcggggcgacatcttgggaataaatcctacaaacagtacaagtaaacaaaaaacttagcacgtgtccttcccttcccaaagctctaactacagacagacacagccgtactgttgaagaagaccgcaaaggctccgatgacggggtaggctcctcccgggatcatctttgccagccagggggcggacgtgagcgccgcgagctgcagcgccccggagatcagcagcgtgaacacgagaatgctgccgaacttgcgcgagcccatctgcctctccagcacccggaactggaacacgacgtagagccccagcgacacggccagcccactgcacacagcaaatacataattgttagcgagatgcaacaaatatacttacgagaataataaagctagagggaaaatgacgcactggtggaacgtgagctggctcgagagcaggcgccagtactgcgcgcgcgcgagaatggcgtcccggtccagcgccagcaggcggccgcggtccagcagcagactggcggagctggcggcccccacggcgagcgagaaggcgtaggtcacgggcgcgccatctgcagagcagcagagcgtgggttagaggagcgacctgagcagcacgagctgggggacacacgtacagaagccgcgcaggtcgccgtgcatcttggcaatacagtactgtaataccggacagacggccacgtaattgagactgttgaagcgaacgactaagtacgaagtggtgtggttcacccatacggtgcggaccagcttcggtacgttgcgcaacctaatcccccgagattcgtcgcgcaccgtatgagtggaccacataactacgaacgaagaccatcactcttccaacttcaacttcaaagttggggagcatcgggagcggcctcgccgcttcagtgccagcagagtgagtgctgcgtagctgtgggtgtgggtggcctgctgacgtcgccagcgcacgtgagcgagtcgagtcaagcagcgagtcctatctcgctcaggataacggtccggcaatcaattcgtttcgaaacgactgcaatcgtcaaggggcgccgctactaaaggcgtctccgcgggggcgcttacttgatcatccggccacgacgacgcgccctccctcgatcgcagagggcggagctgccgtaaagatgctcgcgcgcaggacgcccccgacgatctcgacgcggccgcccagctccaagacgctcgggaaggcgctcgagagccccagtggcaacaaccagcagcacagtaacaacgccaaccatgccggacgccccgctccgctcggccagatcgacgccaaccacctgcaggtcggcaccaaagtgtgggtggccgacgccaaagtgctctggcggatcggcgaggtgcagagcatcgccgacgaccgcaagacggcgcaggtctacctccctgatgctgcagacgaccaggtgcagaccctgcgcatggaccagctcgtcaccttcgacgcgtcgcacattgtggatcacgcggacgtggcgcttatgaacaacatgcacgaggcgccgctgctcaacgtgctgcgccagcgcttcgagcgcgacgagatttataccttcacggcggatatcctgctgtccatcaacccgtacaagtccatcccgctgctctacgacgtcgtgggctttatgaagagccgcgaagaagctgccaccgccacgggggacggttctaccagcgacagcagcgcaccacctcacttgttctccatcgctgagaaggcctacacaggcatgaagggcgtcgttcctgggtctggaaccccgcagtcgattgtcatcagtggagagagcggcgccggtaagaccgaagcctccaagtacatcatgaagtacctcgccactgcgagcaaacacgccgccagctctagtacagtcgctgcaggcgtccacgaacagatcgaggagtgcgtggtgctctccaacttgatcctcgagtcgttcggcaacgccaagacgtcgcgcaacgacaactcgagccgcttcggcaagtacatccagatccactacagcagcgaagggcgcatggcgggcgtgtccatccgccactttttgctggagaagacgcggctcgtgcgaccggaagtgaacgagcgcaactaccacatcttctaccagttgctggcgggtctcgacactctgacaacctcgtcgtcggacccttcggactcggatcgacccttgttgctgcagaatgacgtgtggaactacacgtatctgacgcgtggagactgcgtcgaggtggacggagtggacgatgccaccgagttcgagcagcttcgtcggtgtctcgagcagctcggaatggacaacgccagcttccaacgccctatgtttgaagtgcttgcagccatcttgcacctcggtaacgtgcagtttgagagccccacaacgcaggacgacacaaatggagacgatagtcgcgagaacgacccaacacatgtcgtgttcccagagagcgacgctggagtgaacttggagcacgttgcgatgctgttgggtgtcgatgccgccgagttcgcgaacaaaatggtgacgcagaccaccgtaactggtcgtggcagtatcctcgagatcaagctcacaccggaacaggccaagaatgccatggacgccttctgcaagtacctgtacggcgagctcttccaccacgtgatcacacgcatcaacgcctgcgccaagcagcagacgtctctgatccccacaacggacaaaaagacgccaaagtctcgtgtccaaggcggtgcaacagcgcccacggtagctccattcatcggcatcctggacatttttggcttcgaggtgatgaagcgaaacagcttggagcagttgtgcatcaacttcacgaacgagactctgcagcagcagttcaacaagcacgtattcgtgctggagcaggagcgatacgcccgagaaggcatcgcggtgtcccccgtggaattccaggacaatcagcgctgcctggacctcattcagaagcctcctctcggacttctgcctctgctcgaggagcaaatgctgctcaagcgcaagaccacggacaagcagctcctcacgatctaccacgggaaccacctcgaaaagcacccgagctacgcgaagccacgcttcgagtgtgacgagttcatcatccgccactacgcgggcgatgtcgtctacgatatccacgacttcatcgctaagaacaccgacaacctgcacgacgacctgctcgacttactgcgtcgcagttcccagccgctactgcaagccatgttcagtgctccagtcgcagcttcacttggtggcgctgcaactaaacgcggtggcccgaccacaccgacaggggcgatgcacaagcgcacacagagtgcgtctctcactggtacaacaaccgtgtcaagtcgcttccgcacgcagttagctgagctcatggaagttctgtggagcacgacgcccagctacatcaagtgcatcaagccgaacaacctcaagttccccggcggattcagctgtgagctcgtacgtgaccaactcacctacagcggcgtgctggaggtggttcgaatccgacaggaagggttcccaatccgtaagcagtacagtgtcttctacgagctcttctggtcgctggcgatcgcgaagtatggtgttgctgctacgcgaaacaatcctggtaagatgcgagaagcctgtgagttcatcgctcgcgagtggctcaaggacaaggagctcgaaagtgaagagcccttgaaagaagacgacgaatcacccgagaccgagaaagacgagactgagccaaagcccccgcgcgcgccggctcgacaaatttttgccatgggcaagaacgagatcttccttcgctacggccaggtggagaggcttgagggttcgttggccacgatccgacaagaaagtatcgtggttctgcagtccaaactggttcgtgctcgactcgcgttcaagaagtttcacaaactgcgtcgagcaacggttaagtggcaggcgctatggcgtatgcgagtgcagcgagcgaagtatctgaagcaacaccgagccgctatcagaatccaagcgcagttccgatgcttccagctcaccactttgttccagaagaagaagcgcgccgcttgtatcatgacgcgagtgtcgcgtcgatacgtgacgcgttgcaacttcctgcgattcctcaaggctacgcgagcagcgactgagatccagcgtcacgtgcgagggttcatgctgcgcactgccgcggagcgtgagcggaagttgcggcttcgatcgacgctgaagctgcagtcgtggcagcgcatgcatgctcatcgtcgagctttcttggcccagcgacgtgcagccatccgtattcaaaccaggtaccgggctcggacccagcgccggcggttcctgctcgagaagaaagccgaaattgtgctggcagcctttgtgcgtcagttcttgcagcgaagacgcttcaaaaagctcaaagtttgcatcacaaagacccaggcgttggtgcggaagtgggaagctcgccgacgttttgtcacgctgaggtctggggtggtttgcatccagagccaacgccgtcggcatgctgctcgacgcgtatttgttgtccggaaggctgcggtggctcgccttcagcacgccatggttggatggattgctagatgtcactacctcgcgttgaggcggagcacccgaacgctgcagtactgcgtcaccagttggctgctatgtcgacaattccgacgcgcgcgcaaagcctcaaggcggattcaaaagacatggcgttcgcacagtcgacgagtgaagtgggaggctgaggtggctagcgtgtttgttagccgcagtgtaaacgggacaagcaccatcgcaccaggcagcggctcgacatcttggacccagcacacgcgcatggaggactcagaccgcaggatggctaagctgcgcagccagccggacgtctactttgtattgcagccgcgcgccttcgggtataactcgctgttccatgaggctgctgcatgcggggacttccacgtcgtcaagtacatgctccaagagcgctccagtgaagagctgctctcgctcaagaatggacggggcttcacagccttccacgaagcttgcgccaatggccagcacacgatggtaaagtatttggtgctgcaaatgacagcaatgacagctactggagcgcgagaaaataccccatcgaccccgaaggcactcgagcagtccaccaaggcgaactcaaccgatgggcccgaagcgaaggagaccaatgcaacagcttcgtcgtctgatgaggttggcaaccagcaagaagaggagccttcaagcagaattcccgagcgaacgattgtctacagcggatttcttcggaaacgacgggagacatcacggtggatgaagcgattcgtggtgctcagcgtgactgccgacaaacaggaccacccgcaactcgagtactatccaaacgatcgcaagttgacgttggctggacccagttccctgcagatcgacttgaccacagcgttgctcaagacgagtgtggacctgccttttgcgtttgaactgcactccccgcaactgcttggtgggcgcaacaaggaaggtcggctttacttcgcggcatcaggagcccttgagatccagtgctggcttgcgcacttccgtaacatcatccccagcagcatcgagtcccgtgtgtttgccatgcatcggtctgctcagaacagcaagctcgagtttgtcgacttcaaggctcgccaggaggcttgcaacttgcgaagtgagtcgtcgcgacaggagacaccactgcacttggtcgccagctgcagcagtcttgtgattttggcggcgattgatgacgacaccgacaacaacaagagcagcaccaccagtgagattcagcttgacgtgaccacagcagcagctagctccagctcgaagtccaaatccttgttagacgcggagcttgagctggtgaagacagcgcagtggctactggagaatggagccgatgtcaatgcgatgacaacaagacaagaaacaccgttgcagttcgcactgcaggctggacacttgatgctggcgaagctgctgctagaccgcggggctcttgcttcaaatctgtcagagccgcaactggtatttgtgcgctgcttgaaggctgaattggcgaagaccgccatcactagcatctcttcagcggcgtgcacatctgtaggaatctcacacgcgccccagccaccttcgaacccgctgttggcggcgggaagtgctctcctcaaacgacccaacaagttgacgcggcgcttgagtgcgagcgaagaagaactcccaatgctctttctggtcaagcagcctggcaaagtgcggcacagctcgtacgtgtcgctttttgttgagctcattgcactgagcgacgcggcattgatcggcgctcggcggccacggatagttatctcggtgatggacggacagcgcaacctcgtggaaatgaggcagcaggtgtccgtgcagcctgtagcgtcttccaacgccctactctgggggttcacttggcacatgcagacaccgctggagaacttgccacacggagcctgcgtcgtgcttgagttcgccaccaccagcacctcgtcggtatcaccaacaaacgacggccccacgtctccaacgcttggcgcgagcgtgctcgtacccgaatgctggacgtacctgcaagtggaccagcgcacagccaacagcaccgctctcaccgctgagatgtacaagtacccagtggacttgtcatctcacaacactctgcaccgcgccgacgcgttcctgtccggtgagatgttgatctcccaagctcgagccacgtaagatacacttgacatgcatgttagcctatcgtagtcaccgacacctcctcccctcttaccttgaatacacaacaacaacaacaacaaaaccaacaccacacgtgaaaatcaaagcaaaaacacggatcaatctattggaacggggaaaagtagaaggtgtgtccatggggacacatgtactgcccggcctggctgcctgggggcatttgcacacgcgtgtagcacgtggggcattggcgcatgatgggtctgggcccggacgtcatgggccctgccccgttgaagctctgccgcagtccctgcgagttgcccatgctcgggggcatgcgtagttggaacaggtggccattgggacactgcagcgtgccgcgcgccgtcgtgctcaccaggcagcggatgcggcacgtggggcactccaccaccacgttgctgcgagcggccgccgctgccgccgccgcccgcgcgcgctcctgcgctgtgggggtatgagccaaagattgcccacatccgtcgcaaaactgtcctcctgagcctcgcttgccgcaatttgtacctgcaagcgataaagaagaacatcagtacctgtgtcttataacgaggagggtggtgatgatcgttatagcctggaacttacagtacgggtgggccttgaccagcccctcggtctgctcgggccactgcgtctgcgccttgcggcagatcgggcacttgtccgagttggcctcgtcgtggttgacgttctccagcaggcagctgaagtggaagcggtggccgcactcggccgtgaacagcgcgcgccccagcgccagctcgtccaggcagatgacgcactcgggggcgtcctccatcacggccagcggcacgttcttggcgctgtcggcggtcggcgccggctcggccgacgcgggcgccacgggcgcggggctcggggtgctgttcgcgtacgccgcgcggtgcagcggccgctgccgcgcctccacgtcgctccagcgccgcacgcgcaccgccattgtcgagcagctatacaggcacacggggcttcttgcgttgtgcgggaagaacagaatccagtctggtacagaatcaggattagccgaaaaactaaaacatgacgtttcggaggtggttgactatgcagaaaatgcattttgtaagtgtgtaaccgcaaattgcccaacttagtttgccgcttgcgaccatatttcctgcgctagctcttctccaaaaatgcgcctcgcatcgttagccgcttcgtggtttccaattctccaagctagaaaagtgtggacgcatggcgttcctgcaggtaatgttcccatacaccatgcggctcgtgaacatcaaaatcgtactgcactgcccagcagtctcgttcgcatccccgcttcaagactggcgcgagttgaatgtgacagtccctttcgaacgcagcagtaacgccttcatcaagtacagtacatgtagtggtcgaactggaagaagatgaaggttggggttaatagtcgaaggtaaacgagctggaactgcgcaagcttctcaggtgtggcaagcatagtttcgcttacaatgatgcggcattgcagtttgactagcaagcacgttcgttattggtactatacgaattgtagcttacgatagcaactccttgtgaagccgtacaaagtagtgtgtgtacctatgataaccgagagagagccctctattcgagtgcccaactgtatatgtcgcagcgatgagcaaagtggtcccatcctccccaaacaggcggtgcgccaggagctcagaagccaacgagctgcgcagacaccgccacctgcactacaccacccgctaaagccacaatgggcggcactctctccgtgtgcggactaggcgaccgcgacgcgcaactggtgaggacccaagaacatccttacccttgccattacccgctccaaactctaactccatcacgactcgactctaaccacatcagcactaccagagcaaggacttcgcgcgggacctggagcggccggcgcaggcgcgcgggcgctcgctgtccacggcgacggactcgtcggtggcctccatcctgtccaactcggagcagctcatcccggacgccttcctgcccaaagacatccaggtgctgtcgcagcgtcgacaacgactgggccaccaccactcgcgctcgtcctgggggtcgtccaaggtcggcagcgcctcgtccaggggcgcgggcaccgtgcgcgtggtgcgcaacagcagcaaggccgtggacgtggccgactgctcgccgggcgtgagcgccagcctgcgcaagaagacgctgttcggcatcaaaacggcgtcgtccagcttcggatacagcgacgacgaggggaacccggcggcggccggcaacagccgactcccggcccaagagctgcgggtcaagtagacaagcggagacaaggggaggcactgtagcagtaggacaagcaatagggtgtgaagtagtgtactagtagatagaggacgcaggaagctagctagctatatccatagaaggcgaaggcgaaaggttagcaagcaggtagtaggaagtagggagggaggacgggttgtatgaacaaggcacaaaagctgtatttgcgacattccgcccccccccctcgctctgatgaaatggggtcgggactctaggcttgttgcttcttgacggcggccttgagctccttgaccttccgtcggcactcgcggtaggcctcgctctcctgctcgcactcctcgccgtcgcgcaggccgccgctctcggcgttcttggcttctacgcacctgcaggacgtgacgtgagtctcctcctccacgggattccacgggctcctctacacctcacaggcacacgcagacgcgtggcactatcacactcacttgacgtaggtctccatctcgcccgcgcacgggttcagctcggctggcttggacagttcggcgcccatgactcccttcgagctgctctcttggcgcttggggaccgcagatagacacgctgtcttatgtaacaaaccgctagaaaacgggcgtcccgttcgcgccgaccgccatgcggattgaagtggtgcgcgctcccgagccgctgggccccgcgctggctgaagcagtcgacgcgctcggccggcggtccgccctcgtacgtgtccatcccgccagcccatcgccggtcttgacacttcgaggcgatgggctctagatacggtacacacagtgacctgcatcttgtctgccccaggcccaggctctctcccaggagatcacctcggttgcgctcttcacgacgcccggggcgacgcaacagcgccagcgtctgctactggctaaggacgatgatgaccgcgtcatcggattcctgaagaccggggtcaagcacctattctacatggtaagaagatgactctctggcccagatggctacatcctgtggacgctcggtcacttgttgacgtttgctattgttggctgcttctgctctatgtatgatattctagagccacacgggccagtacatcgagatggatccgctctgcgtgctcgacttctacgtggacgaggcctggcagcgtcgcggcgtggggctgcagctcttccagcgcctgcttcaagacgagcaggtgacgccggcccagctcgcctacgaccgaccgtcgcctaagctattcgccttcttgaagaaacacgccggtctcactgagcacttcccgcagcccaaccgcttcgtcgtgttcgatgcgtatttccagtctcgtcagtaaagcagatcggataatagaaaaccactcgctgtgataaggcctgagcgcacgtctttcgaaagcaaactcacctcgtattgctgcgtttactcaccaagggaggccaggaacgcctcgaccttggtgtcagcgtcgctggggttctcggccgtggcctgatcaaactgcgcctcaatccgccgcccagcaaaccaccgcccgttcatcaccttcagacacgcgatggcagcactcagctctgcaaaacgcacgaccaccgagccgtccgctacaatttgaacgcgctccactgctccgtgcttgctgcattccgagcgcatgtcctcctccaactcgtcgaagaattcagcatcgctgccctcgagtgggtcccatatatgcttcaagatgacggagcgcgacggcaagtccaaacgcgccgaatcatccgccgaagcaatcgccagcggtgctggtgctgcagaggaaacttgcattttctccaccggttgagtagcagcttgctcgacaggcgcattgtccgtggcttcctctgtgcccttcgtcttctggttcgagaacgtcgcctcagtcgccctgtgtacaccagatcctcgttagcgccaagtaattcgtgcatcagaacacaagctcacgtagctagcgtctcgtacgtgatgatcacaccaggcttgacttcgaagtgattcaactgcaagacacggaacgagacgcgtatgagcaacacgcgcagcaacgctcgaatccaaaaggagactcgctctgcttcatcctcgtgcggctatacatcaacccagctgcagaaatctttaatggttttaccctgtcaatggccttggccattgtagcacgcgagcagaacgtgacgactgcatcgccctatatccacatccaaacaaaaggatctgagcaacccacccggcacgaccaagcagcaagtcatcccctcctaccttcagtcctcctctttcgtccttgtagaacttgatgcgccgaaccttgccgatcttggagcacacgccctctgcaagacaagcaaccccctccgtcaaccatcacccctggcctgcaactcctcaatcatggactgaccgagctgcctgcacgccatgtacgtggtgaggcccgtgatgtagacgctgctgttgcccttcgagccgcctcccgtgggcgtggacctcttggcgctgggggcagcagcaggagatccgagcacggaggccagcagttcgtccgccgcttgcgaagcctgccgctcgtcctgtctgcagccgcattggcgcgttacgaaggggagacacggatcaatgcaaagctggaggttggggtgcgcactgctggatgtaggcgaggttcctggccctggcgcgctcgatgcgctcgcgctcagcatccatgctggtcacgtcgcttcagtattttttgtcactgcagtcactaaagtgaaagataacggctggatgatgatcattggttgaaagtttctgtagacgaaaaaggcaacttcaacaagtgttgcgagtctggcgtgccctgacgcagcgttgcgttaatttcacactattgggccgcgccctgtagctgcagggtcctctgaatcaggcgaagcgacttccgttttgatacaggctacgtgcgtttctgttagccaacgcagtcgtctccaagtccactcgagcaccgcaacgacggcacacgtacccccccccccccctcgtgtaaaatccaactaacgcgattcactcggcatcgatgttagatgttcgttcacttggcaaaatgccatcagcagcgcacgacaagaccagcagatcgacctccagaggctgcggccgcacgctcttctgcatgggctcggacaagtgctcgccggtcgatgacgccttaatcgactcgccacgccgtatcccgctgaccgagagcgccagacgcgcccaacggaagctgcagctggcctgcctgtgctccgtcgtcttcatgtgcgccgaggtcgtcgggggatccatcgccggcagtctggccatcatgacggacgccgcgcacttgctgtcggacgtggccggcttctgcatctcgctgttcgcgatctggatgagcacgttaccagcttccaacagtttgagcttcggtttccaacgagctgatgtgatcggcgcagtggtcagcgtgctgtgggtgctgacgggcatgttgctgtacgccgctgtgaaacgattcatcgagtgtctggagccccatccgaaggagcacgtcgacgggaagctcatgttcatcgtggcctgcatcggcctgcttgtgaacatcgtcctgatgcagatctcgggccacggacactcacacggaggaggaggccatagccactcgcacggggagaaaacccagggtcactcgcatggaggacgttcgcacggtgaaggcaatcaccatggccattcgcatggaattgatgctaaacatggccactcgcatggtcctgaagaatgcagtggcgaggaagggcgccgccaccaccacagtcacgaagaaggccactcacgtgacgaagcccacaggctcagccttgaaaagttccatgctcacgatgaagataacaactgggtagggggagaccttgagattggcactattagtgccaaagcctcgacgcagaaaaagctggacaattactcgccgcaagaggaaggtcatggcagcccaagccacgggcattatcacgaacatggcgagcacaccaacgaggccggtcaggatccagaggctgcttccacattaaagccgaataagaagaaaagcatggagaacctcaacattgaatcggcatacattcacgcgctgggcgacttcatccagagccttggcgtttgcatcgctggtggactcatctggctcaagccagagtggcagattgcagacccgatcgccaccttcacttctcggtgctagttctgttcaccactgtggggatcattcgcgaaagtatccacatcctcacggagggcacccctagaggcttggatgccatcgagatcgagcagggactgcgtcagtgctcctctgtcgtggccgtgcacgacctccatatttggtcgctgagcgcgagcttgccttcgcttagtgtgcacctcgtgtcggacgacgtcgagactgcgctgcatacagcccagagctacctcctaagcaagggcatcacacacacgactatccagaccgagagaacttcaacgtcgtatcctcgggactgcaagtctgagctgaggcccgttctcaaccgccgcatgcggccgcatgagccgaaataaggacttgtgattggttagcacgagagtgagtaggggttgcacgccgcagcaccaatcagagcgctcttattgactcacctgctggtacagtaccctatcagacaacagccgacaaggcgtcaatttgactccttggctgccaaagaagtcaaccttgtattttagcttctgctcgaggtgttcgggccgctggtgctagcggacgccaacacaaagggggcccgctactctatccggcctacatgtacacgatttcgtgttattattgagtgcatcgtacagaacgtgtaatgttacatctatttcgaagtaacttagatacatgttccaggtagtggaaaccacctttagatgtagaacccccaccgccgggaagcgtgtactatgtctacctgctctttagcaggcgtagatcaacatgcactagcgtttcatgccctacgagtggaagttatgtatcagccaatatacatgtggtcataacatgcatcggttgacggagtcgtgtgcgtgagagttaaatgttatcgtgtaccgtgagataaaaattaatagctgcgactgctgccgacagttaccagcacgtgcataccatatataggggccaaacaattcggctgcagtgcctatggagctgattgttgttatgcattcgagaccttgctaacttttcttgatttatgatgacaaacagcccatatccacagccaaccatgatgtttgggctttcaagcgagctaacgtatacctccatgcccgcacgatatcggcgaaggcgtgctgaggcgaaaggcacggttaggtggcatcagtagagctttttatttgagtaaacagaggtttagcactaaaataaaatgtgagtatgtcgaaaaacttgttgtgtttctgcatattgcaaacatcttcagcaaaaacctggcgcagacaacaataaggaaagcgatacaaaaagatctactacgctggtcaaccagcagtgtgaagaaaaaccgtccacctacagcgatatggtggagctactcaatgagtggatcgccaacttatgctacagaagctacttgtaagttacccccaccagtataatgaagaaatataagtgcgtaatcttttgctgcacaaagcaaaatagattcctttagcgtagagcgcgtgtagcttcacaatcgatggccgatttagagatttttaacgagtttccgttttcattacagtttttgtgagttgccttgcattcttgctgtttggttttaatctactggtacgtcggatacctatttagcattaatccactacaggcgtacaagtacttgttcatatattgttttcagttggtgtatgagctagcatcgagaaatacgagtcttcggcaaaactcatcatacttcgcgttgctgcttttggtatgttttgagttcgaattggccgatgtcatctggaagctcatgcgggtagggcgcacaattcggccgcacgagcgttctcaaccgatgcggccgcatgggccgcattgtacaaaactgtgcgatgcggtgcggcatgcggccggttgagaacgggcctaagatgcggacagatctcgccagcagcacatgacgcctagagctgcggatgatactttggttgaggtatatattataaatatacggagggcagcttgtagctctacaattgcattagtgcggtaaacacggaggtatacatttagcatatgaagaccatttggcggcaggttctatcatccctgatacagtcacaaccagccaaagctggtaaacctatgaccaaagaggcacatggggcaaggcagtgtaatcacggacagtggtggtataatactcggttcaattgacacacgagtaaggctcacttcacgagtttcctcatactgcacacatcggcaacatgccccacagccacagcccaagggggaaccacaccaacgatgccgaaggtcctcgccgacttgcgctcagtgagagtgatcgacgcgctcaacggaaactgcagctcgcgtgcctcttttcgctgctctttatgtgcgccgaggtcgtcggaggttacctggccggcagtctggccatcatgtcggacgctgcacacttgctgtctgacgtggccggcttctgcatctcgctgttcgcgatctggatgacccaacggcctgccaccgaccgcttgagctatggcttccaacgctcggaggtcatcggtgccatcaccagtgtcttggtgatctgggtgctcaccggcgtactgctctacgaagcggtggagcggttcctagactgtctgaagcccgagccaaccactcgcgtcgacggcaagctcatgttcatcgttgctaccattggcctgctcgtcaacctgatgctgatgaaaatcctcggccacggacactcgcacggcggccacggccactcgcatggaggccatggccactcccacggcggccacggacactcacacggcggtcacggccattcccatggcggtcacggccattctcatggcggtcacggccattctcatggaggacatggccacgctcatggaggacatggccacgctcatggaggacatggccatgctcacggggaccacgatgaagtgcacgggcccccgcacagtgaccgtgcgtccgaactgcgtagtgagcactcgcatgtatacgaagacttgcacagcacgtctcattcagatttccacattctcggagaccatgaacactgggtcggtggggatctggatgttggtgcgggtgacaccaccccgacgctgaagggggagaagaaaaagaagaagaaagagaacttggagaacctcaacattcgctcggcctacatccacgcactgggcgacttcattcagagtctgggtgtctgcgtcgccggtggcctcatctggttcaagcccgagtggcagatcgccgatccgattgccaccttcgtcttctccatccttgtggtggggacgaccgtcggcattatccgtgatagcatccacatgctgatggagggcacccctctcgacatcgacaccaaggatatcgaggaagagctgcaaaactgcccgtctgttgtgggcgtacacgacttgcacatttggtcgctaagtgccgggttgccgtcgctgagtgtgcacttggtgtcaggtgatccagagacagcactccgcggcgcccagcgctttctgttgtccaaggggatcactcactctaccatccagatcgagactcccttcgcaatatacccgcgcgactgcgccgccgatctcaagtgcggccaggtgtcgccaccgcgcgaggaatacgtagtcgactaaaatatcatgatactttcaacttgcaaatggatcgcccgccctctttactatttgggaaaactattaaaatgctactcatagttttcccatttactaaaatgccacgatgggtacagaaaccatagaagacgagcgcaagaacaaatgttaagtagaactagtcatatttgagcctgttcgaccagagctttcagcaggcacgcaagtttgtgaaacaacgtttgttgtggccaggacaacgaacagtatatggacgcgatgacgtgcgcaccatcgctgcttctttcaattccggcaaattcctaaagggctgaatgaaatgtacagacgctagcagtcatgtcaagtgaacaaataaactcaactccttcattgtaagtgccgcgcaatactgtcaagttggcacgatccatattagttttccgttccccagtatcagcgcggcgtgaagccacgtaatatctgtcttgaaagtgcaaacgcgagcctccatgacaacgatgatggtaatccgattgtcatccacgaagaacctttgccttggcttgtgggttccgaccaccatctactgtagacgaatttggattcctcgtcagcaactacacctttgcccggccatagttggcctaatttgcaagcaaagttgtcatgaatattggaggtaccagagagtaacattacattccctaaagtatgactttcgtttcattcaaagttgtctaattcccaccaacgcctttggcgtactctgatagagtgcgaacttcgcactgcgaagtgacgccagcacagaggcaagatggcgaaggcgaaggcgtgtgtgcgtgcgtgcagcttcttgagtgtccgatccgcgtctgcatgcccttcatcaagcggcaactgtacgcgcgcgatctctcaaggaggggaacatgggggcgcgttgagaccgcccctcactgagcagggggtgagacgtgctttgcggctacatgtggtgcatgtacctctcgatgggaattagagaactttgaatgaaacgaaagtcatactttaggaaatgtaatgttactctctggtacctccaatattcatgacaactttgcttgcaaattaggccaactatggccgggcaaaggtgtagcgcaacagcctagcccatatacattgcggtacctagcaaaacgagacgattattaagcagttagtcaactttctctgtcttgcggcttccagtcactcttgaacgctatcgcgtcgaattcacgagtgttgctacgaggaaatcttgcttaccgtgacaactctgaccccgtccaggggttgatcgtcgagactgggtccttcacctgctccttgaatcttcgacaccgacgccaaacctgagtgaggggaagtcgcggtatgtaacctttcgaaagttttgagctcgtggcattttagtacccatcgtggcattttagtaaatgagaaaactaggagtggcattttagtagttttcccttactatttttcgttgactgtggtgggtttcggctcggagcctatccacgatgccttcagtatcaatttaggttccgacgctgactgcatcacgattgctgtttccgtctccatcgcttcattgaagtttcaaaccgacggatgaagtatgtgtcgctctgtatgacgtcaagcggttccacacgcaacagatacagctcctttgttgtatcaaaactcagggccaagtcattgtgtgcgaatcgcgcatcgacgatgtgtgcgtcgtgcgccaggatattgtcatcgaagaacatggcgtggacgccttcgtcatcgtcggttggatccagaaccaatagcttcccagcagtggcgtcttccttattgcggaaccaatgcgggtagaagtcccgcagcgccagtgtcgcctgcgaatcacgccagcgtcgagctagaaggttgtggatttcggacaaaccttgcacaatctgaacttcttctccatggggagcgtagaacgctaaaggatccacatcatcggcagttttgggctgcttgaaggtgcccataacaagcgccgtggtgctttctgctcgcaagaacgtcccaaacctcggcatttctccgtctgattcttgatgaagatgaatccgtcggtcgattccttcatccgatccatccatagctttctccagtggaaagcacggatggcgcccttcacaaaagcagttgaactcttgcgccacgcgatggaggtcatttccataggtccggaaaatgaggttgaacttcacgtcgttcgtctgcaaatactccatcagcctgaagaaagctggcacaatgaagcagtagggggactcttgcagccccacttgtcccagctgtacctcagtcgccgccgtatcaggcagcagcaagtgttgcagcagctctccgtgttcacttgccagtccctcccccgggtttcctttcgccgtgaaatcttgacgcagcaccttcctcatgcgcttgttgtgcttggcaacctgcgggtctcccgacaaggggaactgcatggacaacagtgtcaccccttcagttccaccaaccgccgacggggtcgcccccaaaacacccccactacattcaaccccaccttggcccttagaaacgatccatacgacacgaggccgtccgtaccagccctcgtctccgtagctgtttgcagcgccttctccccgtcccagacccacttcgtgtctccatcgggggcgtccaccactcgccccaaggcccgctccgtcagcaagtcgttgagaatatgtagcagcgtcttgccctgcacggggtcgtgcatgatcacagtctgcccaatgccgtacaccgttccgtcaacagataatgaacgatacagagaactctacagctgcagcgcaccttgttcacatcgaagtacagcagcacgtgcggcgccgccgccgccattttagccttggattcgtcactgcgaatccaagcgtactttagaaatccacacaccgaaatattgcgcacttagacaaagtggtgtgtaccacgccaaataccggccatcgacagacaagtatggcggacgcgtcgtcgccgctgggggcgctgcaggccctgcgccagcacctgatcgcgggcaagcccgtggccgtggacggagacgacctggtgttccgcgatgcgggtggcgccgagctgcggcggctgcccaagcacagcgcctcggcctaccactccaagaagctggacaagagctacgacctgctggccgtgtacacgtgcttcacgcacgaggcgctgagcttcagcgactacgttctcaagtgccgcgaggagaaggcggccatggtgtccacggtggacaagaaggagctggtggcctacctcaagggggacatcgaggccagcgcgcagatcctggacgccagcggcaagcccacagagaccaggaaggagcgcaagcctaccggctctacctccggttctaccaagaagaaaagggagagcgaggacgaggcagcccgcgcctccgccaagaagaggaagctcgagagcgcgcgccaccaccgagacggccacaacaagcacggcgtgagccaccacaagacccccgaggagctgcaggcagaggcccagatcaagaggataacggataaagagtacgtcaacaggacgaggaccacggtgctggacgcgcacaagaccaagttcgacaacgtggccaagacgctcgagctggtgaatgctgagaccaaggagaagatcgagaaggccaccaaggcctcggcgctgctggccaccaccacggccaggaaggagcagatgccgctgcatcgaatggtcaaggagaagatcctgggcacgccgattattgtggtgcccgctggcttctccgacttgttcacgatgcttaatgccagggacttcttggaggacggcgtgtatgtttccaacgtgcagaagaaggcggacggacaccgcaagcagcagtcaatgatgattacgcatgaggaggacggacacgtgtacaccttcaagatcgtggacactgtcagtcgattccgggataaggactggtgcgttagtaaaaaaaaagggggggggcgtgtgttgctgtggtggactgctaactgatgaagttttgatgctcctgctggttcatggatgcaggcgctcggtggtcggtgtcattgtatcgggacagtcgtggcagtttaagggctggaagtggaagttcccgctcgaggtgttcaagaaaggtatggcactcgcttgtgatacttcgtgctaaggactgtggtgcatgcgtggtctgacacaccgagtattgtgttatggtgcagtgtgtggagtttacatctacaatcaagggtcccagctgaacccggacattaagcagtgggatgtgaaggtgctaatggtaaggttgactcctcgtgcaatgatcgtatcgtctgaactgtgcagctaacgtcatgcatgctacttcgtgcagatccatcccgacaagcggcatttggacaaggtggcagccaaggagttctggcgctacttgttcgctttcatcaagctgaagctgcaataggcagcacgtgcatgctctgccataatcgcagcaaatacaaacacggaaactaactaacgaggacgatttcaagtatcgccaccgcgcaaattggtatcaaaaatgatgctttcatcttgtgaatgatggataaaccctcttcgttcgaaggccattcaggaatttcccgaccaaaagatggtgaccctgatttgtgcgctcgttggcgcagaagtcggcgcagaagtcggcgcatttcatgtcgacattgatggaagcaaactggtgggcgagttgaaggtggagatcaaggagaaagagagtattgcgtgccctacgcggttcatggatctcttcctggcgaagaagggagacgcgtggctgccaagcgatgatccagcggcgcggaaactggctaagggggagatcgatgaagaaatcgagcaattactgagtggagatccggtggacccggccaagacgattcaagaagtgttggtaatcaaccgcatgacgcggaggaagcggagagctccgaaggcggtacaaattcacatactcgttcgttttacgctctggaagcttgaaaaggccgcgagatgaggacgacggggtatggataccaggacggacgtcgttgaatctccgaaaactgttggaaacgagcgacaaacgcggcgatttgccgccgagaggcgagtttttcgacttgttcgaatggattgacgacaactgcaatgaggtcaaggatattggaacaatcgcagaacttgtggagtttacgggtccgaacttctacgtgcggaaggagattctgtgtgtgctggaggtttttcacaaagtttttccggagtttttttgcactggtacaagaatttccaagaccctcattttgacagggagttcaggaacaggcaagagcttagcgttgctttgcttctacagatcgcaattcggaaggaaaagccggttgtgtggcattgtgctggtgacggtgggtatggcaacgattccataacgcgtttgttcctcgtcggcaaatactacgagtgggagggcattacgggtggaatttacacgtcgctgtttcaaggcaggcacgacaagagcgcgaatcttctcgactgctggttttgtctcgacggggtggatcaggagcggatcaacgatcgaggctggcaagattgctatcgactgctgacaactactgggcaattcgacgcgaagagcgaagaccaaacactctgcttgctgccatactggagataagaggacttggaagatctcgccaggaaggttggctacccggacgaaagcgacgttcccggtcaatattttgcgtcgggcggaagtgtgcgtaactatcagtgagtcaatggtttcatcaattgggtctacttcagacgggcagctcgattacgttggcatgcggggtgtgatcaacactcgtaatgtggaacattataccaatcctgagcgttggacctcgagcgttacttcgatgcttgagctacagcgtctagcaattgtgatgccccccagcttctttgaaaagctcatcggggttgctcaatcgatgagagatggtcgtctcggttggccaactgaaagtcaaccgtgattgagggctgcttagcagtgatggagcggtgggccaccgattcttcggaggcggactattggatcccggcaagcagtttgtgcggaacagttgacgcggttgccaaatggacttttcccgacgttaaagagcacttttgctttctgcggttgacaagtagcagtgcacacgagcccaatttcgaaatccttcggagcctcttgcagctgttcgtggctaagaagttgccagtgtgctccattgtgcttcttcttgacaagaataaggtggttgaatcccggccgagcgctttgcagaccgctaaagcgatggcaagcattcccgtctacgttggccatgttgatcttgtgtagaggagcttcctcccgatagaccgtaactgggtaacacctgcacacatgccaaagcttcaagaactttttttaatgtaatccatgtgcatgtgacgcattcataggcactttattccccgttattcactgtagccttgctcggagcctgtttaaagtcttcagcgtctcccagcttttctagtcgctattttgcggggagtcctggccgcacttgaggtcggacgtgcagtcgcgcgggtacagcgtggccgtcttctcgatctggatggtcgtgtgcgtgatgcccttggacatgaggtagcgctgcgccgcgtggagcgccgtctcggcgtcgtccgacacgaggtgcacgctgagtgagggcaggccggcgctcagcgaccagatgtgcaggtcgtgtatggccacgaccgacgagcagttctgcaggccgcgctcgatctcgtcggcgtggatgccgtcgggggtcccctccatgagcacgtggatgctgtcgcgcacaatgccgatggtcgtggccagcaccagcaccgagaagatgaaggtggcgatggggtcggcgatctgccactcgggcttgtaccagatgaggccgccggcgatgcacacccccacgctctggatgaagtcgccgagcgcgtggatgtaggcggcctggatgttcaagttctcgagcttcttctttccctgggccttgtccgtcttctggcccttctcgaggtccgcgccgtgggaatggccgtgacccgagtgggagtggccatgacccccgtgcgagtggccgtggcctccgtgcgcgtggccatggccctcctcgtcgctggagctggcgctgctgctgctgtcgccatgcgcgtggccgtggctgccgcttccgtgcgagtggccgtggccgccgtctcctccgtgcgagtggccgtggcccaggatctgcatgagaatcacgttcacggccaggccgatgcaggccacgatgaacatgagcttgccgttgacgtgctccgtcgggttgggctgcaggcactccatgaagcgctccacggccgcgtagaccagcacgcccgtgagcacccagatgaccagcacgctcgtgacggcgccgatgacctcggcccgctggaagccgaagctcaggcgcttggaggccggcagcgtgctcacccagatcgcgaagagcgagatgcagaagccggccacgtccgacagcaggtgcgcggcgtccgtcatgatggccagactgccggccaggaagccgcccacgatctcggcgcacatgaagagcagcgagcacaggcaggccagctgcagcttccgttgggcgcgtctggcgctctcggtcagcgggatgcggcgcgacgccttgcggtccacggccggcgggcccttgagcggcatcgtctcgtccatgctgttgtagttgcgcggcatatcaccgactggagccggcaggaatgcggcgaaatcctttatgagcggccgcggccggctgagtggcccgaatcggtagcgactcatccgtagaaaagatcggatgaggggcagcatactgagcgcaaggtgtttggtgggactgtcgtaccggcatacctatgacggatgatgggtattgtgatcgagtcggaggacaacttgacgtggcgcgtggctcggggccaattggacgcaaatgtccttgcgctgtccttgttgcaggctggacagttctgcgcgatgacgagctagcctccgccgccattcaatcgcaacagcggaagcttcggtgctgcatgcaggacgccgagtttgacaaggcatcagcggcgagacatgcccagttgcggccgctcccgcctcattcccacccgccggcctcacgtagaatccctctgggctgctacggaccacacacatgatgccatcaaagtttgattcaaacccatgcatgcactgcatgagcttcgccgacgtgaatcaagttactgctgccgccgtcggcgccctcgcagttcgccggcggcgccaacgtgggacttcaatgtacattccggtgatctttcattcgctccgtcttattctcctccggaaaatggtccaccttgtccgacggcggcaacttgatgcccgaacacgccatttgaaacctggccaggctgatacgtggatgggatgacgaaccgttatacatgcagcagctctcttgtttcagcgtcacgcgatcggttggtcggtagttttacgccaccacggggtacgaggcgcagtccgccaggccgcacatgttgctgccacgcgcgatctggaagaagccgtccatgccccactcggcgccccaactgttcttgacgatccagtgtttcttgccgtcctccacgccgtaacccacagccagcacggcgtggttcacgtccttctcgcccgagtggcactccgtcgactcgtacacgccagacttgtagaagcggaagtccgacaccacctggaaggcaatgctaaccgggccagtggagcccacggcagccttcagctccttctcgttccgcgacgtgatgttcaccacctgctccacctgcgcgccaacatggtacgtgttgaacttgcatttgccctccttagcctcgtacgggtacgtctgtcccaatgcaacatacaaccaagtcagccctccactcacacttcaccaacaacaccatcactccattcttctcacctcctccgtgtccaagcctccgttgtacttgacgtactcgaaggcgtgcgacggcagaccgccgttgcagccgtggttgtcaaaggcctgcgcgcagtccagcaagttctgctccgacaggatcttgaactggccgtgcttgagtttcaggtggctctcgaggcagcccgtggtcgagaaggtccagcacgagccgcacttgccctggttcttgacgggggacacggccccgtcggcgcgccagtccttctccgtcggcacctcgccgtactccaggccgctctcctccgtcgtggccgagcactgctgcggtgcgcccaggtaccagctctggaactcgtcccacgtcgtgtccgcgaactggttgagctccatagtgaagctcttgctctgcttgctgttgtgcgcggccaccgagcgcgcgttgacctcgaagatgccgcggcgcagctcgtcctgggcgggcgagtcgtagctcttgccgtgcgcgctcttccaggcggcgaacaggccgcggagctccgcagacgtcgacgggacgctcgtgaggtcccacggcagcgtctgctgcagcgcccccttctcgcactgaaagatggcggggggcagctggtccgcctcctcgggcgtgtagcaggacgacggcacggcggcgcactcgcaccaggcgcagtggttcttcacgcacgtgtccttggaggtgaagccgtggcacgagcccgcgtcgggggcgaggggcgaggacgcggccgcggcggagagcgcggcgagcagcagcaggtagggggccttcatcgcttgctagagatcagatactttcgctaatgcgatccgagggggttcttcaacggacacaaacgcgaggattggttgaaatgtgaccaatcagagcacatgcgggcgtaagcttcaacttgaggggccgtccccgggtcacctgacaccaacttggtggtgtcaagtgagccttactcataatactcaaaattgaatcgagaagacatcggaggacgctgcgaataccgtccttgtcgttctctctgccccctcgatttaaccgtcttcacatcagggaatatcgtccttgttgtccccacgctctgaatgcttttaactaatgcgagactagggtttttatcattactcctattaataacaataaggacggaatttatcattgcccctaacaataagagatcggccttcttattggtcaaaactaacaactgccagccaaccgactgtatacaggttacttacgtatacagagtaacctaccgagttatggtaacacggtaagctgtgatagccggaggtgttgcagctaatcgtgcagtcgttgctggggtctagcccagcaacaccattccaggaggttgatcactctaagcaagcgcttaattattttatttcttcaatgtagattcgtaatggggatcatcgctgtcgtgggctattttacaacgactggcttcagcactctcaactagagccgcggcatcattgcacatgtcaatgagcacatcagtagcggactttccaccggacgaagaccaatctatcgttacgaatctcggtgtgtagctttatcaaatggtgaggagctgaaaatgaagcatggacgcttagtactaaggtggatgcaacagaaacattgtccatggccgagcatatcaacttgacatcgcgatcatcaccgaatgcaacctttttgagcgatgcgcacgcagtgattgttgactgatgatgatgaggtattttggaaaattgctcctaatgaggactgagtcctaacaatcctactgccatggtttaaccctcggccgctgcctccccgctattccctagtaagtgttgatctattagagcctctgttgcatctgcgtgcgtgttagcccactcaagcagacatcgcgacactagtgtgtccacatgcgggaatcttgcctgaattgcctctggttctaggtcgtgtcagctctccctccgttgctgccaacaccaagctgcgcgctgcagagtcccccgacttgttcaagagtatccatgacgcgactctcactctatccgccgtgcgcctgcacttgagacacgattgttgactacgccgatagggcggagaacgctagtttagcggataagcttgcgacagtagaattttcccgagttaacatcacagagtcgattgtattcgatgctcccactattgaggttcctacacaaagtttggcaatcaagagcttaatttgtcggtcttgaattctacgaaacacttcgtgcccatttgtaaaactccgaagggtgtctcgtgccatttgggggagcgtttacggcggctgaaacgtgttgctttgagcgcagaagacttgccaaacacaccgttcgcccacccagaactgcgccccagcgcagcctccattacgctaggctagagtatacaatagaaaacttaagtgagctgcagcactgcttcaactgcgacggggaacagggacacgacagaacccaactgccaccacacaatagttcacaaaacgccaacgatagctgcaggctcttgcaatcagtctaaatgatgcggaaaaggaagatttggtcgtgggcttcatttactaccagtcgagcaagcagcgtatcacagcttaccgtgttaccataactcgatacgttactctgtatacgtatgtaacccggatacagttggttggctggcagttgttagttttgaccaataagaagaccgatctcttattgttaggggcaatgataaattccgtccttagggccgttccccacgggatcgcgaccagccatagatcgcaacaaaagcaacatgctataaataaaatgcaggatttactataaatctcttttgatagctttgggcacccgatgagaaacgtaaaaaacataccgacaagagctgcacgtagcacgtgagctctagtttactaggataccatcctttcacgcagcaacgaatatttggtgcggtagcactgcgccgaagccgctgcgcgatccggcgatcccgctcggctcgcgatccgagactcgggtcgcagggggtacacagtcggaaataggcgggactaaactgaccaatcacagaccaagtttgggatcgcgatcccggttaggaacggcccttattgttaggagtaatgaaaaaaaaaccgcgagactagggctacgcgaaggctgggatagatacatgataatattggttggaataggggaagttacttcatcgggtgcgcttactcgtcgattgtgcggtacacggagcccctaattgaaaagcaagcctgaggctcaggccctgaacacgattgggctcgttacatattgcataagaaggtacaggtcaaataatcaaaaggtagctcgataatgtacgggccacggacatctcctgcgcctgcttcgcagccgcagcatctgcccgggaagcgcgagcgattctcaaatgaaaacggactttctcgtcagccatcattctcgtcggtcaacattaaccttaaaactaccggttcatcaccagtttgtacctacgggacaagcgagatcatgactggttacccgggccccgggtcaagcccgtgggtcccggggggggggggagagggtcgcagttcgtaagaaaggttaattgtggtgtattattagttgcgtctaccctagttgtagcgttttttagtgcttgccgcagtaagcgactatatgtacctatccttactacctaagtacctaagtatctaaggtatggttaattgtattaatactttttcaaaactaaaaattgtcgttagtacgctctcctcacaaagctacgtagaagactgtgaagatgtaagcatattctaaaatcctgttcgagtgaaattcgatcaacttgatcatcaagacgcgaatctaaaaaaatgacccccgttgcaagttcgccacggatgaacttttaagttctacttgttgctaggcacgcccaaatacatattccatctggatgtttcgtcggtccttctcttggtgaaaatgctagtgataacaatgcatgacggaaactttaaccctttagttgcccatacaaattctatttaacagttcgcatacttaaatcaagatgtttccacaaaacgatgcatcctgcatcgttttggcacccatttgatgattgcgctgttacgtgccctctgcgctttaacatagtgtagtggcgccatggctacatctcgtgccagcaggcatatcgcacgcaacggatgcgacagcagctacaaaacggactctagcgagaatctgggaactggcagattgtatttgactacactatactgcatactctaggaagcttattgctcagcgaaattaacagaaaccagtgcggcctttgccgcagcggcagcattcaatacagaatccaatttatctgcaagcacaagggtcgcaagacactacaaagttatctttagctgtggacgacgatccaagcatcgggcgccatgagtcggccccaacggaagcgcagtcgtgccaatactgccggagacgatggcgacacgacgacacaagcaacgacgaagctctggacggcgatggagccaccatagataaacgcggcattatgcagcgttttgcagcgtttagcggctgcaacttgattggcggaaattagcataatgctaaagtcatcgaccttgaccgtgtaatttattcctgcactctatccgtgtcgtgtcgcagacatcaagagaaaatacttaggatggaagccgagagagcgaaggggtgaccgctacaaaccagtggccagagtcaagcgtcgcaaaagaaaacgaaagtgctgtctgctctgctgcgtttgctacgatcttgttaatgtctctaatactgtgtgtgtgtgtgccgttgttagcgaatgctcggcgtcgtagtgctggagatggcgtcgtggcgcagcgtcgccagcacgggctgcagaagcagcttgctggtggagtaggtgtgcgctgacgatggtgtcaaaatatacagatttgtaggcacaaatatacgtacatggggagtgaatatatatatgggtttgcaccatacagttggagtgacaacagggagagactatatttgtggggcaccaatataaccgctaaccactgtgatgcatataaatatcagcttaattgtgctggccaagttaccacacgggcggctgcagacaaaagttttcgttcaggagcggccatggctggctggcatcagcaagccgtgcacaattccacgggggaattcgatgactaccgtgacgagtcgatgtgctgctcggcgatatttcacaaggtcgactttgacaactgccgtgtttgtgctggtgaacatacgatgacagaaagacgtcttcggtgcttgagcagcacttgtcgcgagtttggcaaatgtggcgtggtctggaaggtgttctactgcacagctcaggacaggtggcagataactgtaaacgagcaggcacatgcccgtggtgttcttccctgtactgcggagcatcggccagtcgtgacacagccgatgaaagcatttatcgcggcacaagatgagattgggaacgccccacgtattattctggcacatctcaagaagcaagcaaatatcaagccatctaaaggcggatggccagagctctcccagattcaaaatgcgctgaaagttcaccggcgttcgaagggcaccaaaaattcaatcaaggccgtgcatgaaatggctcgcgctcgccgctacaatccagaacttcagccagattccgcttttctgtttggacctaagttggacacggatggctttgtttatgtggggtccggcgaggacgacgatcctttcattattggggtgacgtctctcgcacttatcgatagctgcctacggttctgccactcgggtgattttgtgcagttccatgcggatgccacgtttaaggttagcgacttgggctatccagtgataacttgcggcttcacggaccgagggcgttcataccaagttggtgcttttttcgtggtgagtcggcgcacggaacatgaatacaccgagtgcttgcgcggttttgctgacgtcgttcggcatgttcgaggagcaacacttcgtatcgatgcaaccatgagcgatgctgaggatgctcaattcttggctctcgagaacgtgcccagttttgcaaatgctacgaagctgacgtgatattttcacgttatgtacaatgtacgtaaacgcacacagcacctgccctttgatgaaaggagaaatgtgatgaactcgattgtcgacatgcattttacgcaaagcttgttggagttcgagcgtacacgagatctagaaatagctaattggcgcaagcagacacatctcgttgaattcgcggactacttcgagcagcagtggctaacagaccgctattggcgatggcaactgtaccacaatcctgagggctacgcattaaccaacaatccctgcgaaaacttaaatggagactaaggcattttctgcagcgccgtaagcatcatatgtgtcgattactcgaaaaaatcgggaccttcatcgaaacgacgagtcccgtcaagcccgcgccagcagaatatacatccacaccaacatctgagttagtgaaggcagcgacagctatgcttggagcttctcgagttgttatcaccaggacaagcgatgcgaaccaagtacgagtcctcgagattctacgcgccgacacagaccaacaagctgatgaagaaaacggatttcttctggagacagtcaatgcggctccctccacgtgtaccgatgcggcaacaggaccgagcagccaattggctttgtttctatcattgacatccacgcaagacaacccaacatcagattcgtccgatagctcgtcggcgagcgatatcccagccatactacgacctagactggattcagatggacaggaggacgacgacacggtcacgaattggaaaaggcttttcgagcaagccacatcatggtctctacggcgttcgcatcgcataggaatgccttccgatgggtggctagttgacaccacacgcaagcgatgcacctgtccctacttctcgaaaatgctgatgtgctggcatgttgtagcggttctccggaaatttaacatcaccagtagtgtacgcgacccactggcgaagttgaaaaacagaatcgtagcaaaggccaaggcaaaacgttccggatccaagcgtaagcaatccaaaccagaaaagtcgaagggaaacgcgtctagccgaaaaacgaagcagacgaacagtacatcctcagctcccagctctgaaggtctcccagggcccgttggaaggcctgctcatgcagcaccagcgctgacagttcaagacattctattagaatagagaacactgactaggtcaaaccctctaggtgattgaatacatgtattctttgctttatcgctgtggaaatcgacgatacccacaacctaaatcgcttcctcacaaaaagtttcgatgcacttaaactctcccaaagaatcgactcgtacgattcccgatgacgatctcaccaggtacatccgctccacgctcaacacaaaacttgtacagggcgcttttggtatcatcatatcgtcgttttgcgcgtctaatccgcgccgcagcaaaccttggatcgggttgatcgtactcagggtccggttcgaactgagcggttcccattagaaccgccagtacatcgtccaagcgaagtgcgacggcggaaaacgcgtcctccactgtcttaggtttgtccttgattctggccaagacgaccgcgttctgcgcaccggccacagcagcttcgataataccgaccatactcccgccattgtaagctgcgtggattcagagatcctgctctttgctcagcactgtgtagtagttgttacgcgcgcgctccatctctgcgaatcgtgtttgcagctgagtatcatgctgtacaggctgggttggcatcggctcatcagtcactcgactgctgtatcgaacacgttttggagtgttcgtggaagtcggttgaacgtgttgccgcttcgtcttggctgtagtcatcttgcccgtagtcgttgtggcagtagacgttgtgaccacagtcttcttggccgtagtcgtcttggccgtagtcgttttggcggtggccatcttggccgtagtctttctggccgtagtggtcttgggcgatgttgtgccagacgtcttctttcgttgtcctgggtaagccttacgtcgtccatgatgccgtacgtatcattggggaaactggaatccggtgttgcttggattagacgtgcgcgttcctccggcccaatgtcacgccaagcgtcccgaattttatcaccgccacggccacacaagaaggttgtgtcacgcgtacgccgctccaattcaggtaaagtttgacgaaagcttgcataccaacgcgcgtatcgattccccaccgctgccgcgaagatccatactgcgttgtgtgccctcatactgagtggtgtgctacgatcttctgggttggttcaaggattttgtagaatgaacgcgtgttgcagtctgacctgactaacagcgtggtaataagacacgagtaagtaacaaacccaaggcttcatttaaaaaactctcagtcttaccgtaatgcatattgtggctaagccaatcgaggtaatacctaagacgaagacgctgtcagccaaaaatactaagggaggtatagcgcgattcggcgcaaaaagataatccccatgatccactctgcgtcataggcttgaatttccaccgcaacattgttgtcatcgtaaatgagcttatcaccactcaaaactttgatcgcaaagcagtgcgtcactcgtagtgagctgtaggcagcgcacacgtaaactccgctagagcgcatttcaccaatacttccgacgcgttcttgtcgttgacatctcctagcaaattgtcatcgaatacgcggatgctgatctgacttgtcttcgaactaccacacccaccgatcattcaggtatttgatgtagaaacgaagctctcgagtggtcagaccgtcaggcgacaaggatcgaccccgctggtcgcagtactccacaaatgcaccagagcacccggggggtgcccaaccagagttaccgagaagcgtaactgcagtctccacagcaacaactgcacattttccattcgctgacggcgaggcaccgatattgtgcacgtgtccatttcttcggcaaaactcgtgaaacgacgcgtacttagacgctttccacatgtccacgaccgcacatgctttctcaaagccgtcctccagcaaacgcttcctgggcagccatgagtcggcccaccggtatccatcaggctcatctcgccactggaccctgtaccaatacgcaagccctaccggcatgcgatccacaattgcgtacactaatccctcgtcagcagtatcatcacggttctcgacttgcgtacaacttgagtcgtcatttcgacctttaccggcgacgacagagaccgatacagcagcagattcagcgtatccatcatgcgagttaacctccttgcttgtttgaccatccgcgctctgtagtctcaatactacattctcggtgaaattcttcggtcggtcttttttgctggcacgagagttcaacaacttgtccgcagcaggaccacaaaagcgctcgccagacctgtacaccttttttggcttccgacactgcgcccgaggacatccacttgttgccctgcgactcgcagaagccaagctcgggagtcccagacgacagtgccgaaaaccactaggatgcggcaagttgcctctgtagacgagcatgaccacgcctatgcagatcctggcgtctatatcttggcgtgtgtgcaattgtgccgtggatactgaagctgtagggtgtcgttttgatgtatgttgacatcgagaaagaatactccgagagaccctcggtaggtcagcttccatctttcgccttctgtaagttgaccaggtattagcgcctagatcagcacacaacggtcggcagaccggcagaattgcgctggttgctgtgcttcatcctcgtttgtgcgctgttacacacggaacatgtggagagagtattttctgtgcgcgtatattatgaaccaacaagttgtatgaaccaacaagctgtatgctgggccccagaacctggaaaccttttgtcgtgtgcgcttgagtaaggtcagcctgcttgcgttaaggtggtgcctgagcggcagaggtttttgtctggcttgttggggtggacaggcatgtaggttgctgtttcaatgtcttatggaagcggggtaatctggtaatggtgatggtatagcgttgttgcacatatggccttgcgtttttcgttaccctgtccgcacatgtactccttgcatatggtcgaaaggttggtgggtgttctcattctcactttgcattatgtctcctagaaagcactagaagataagaagatggccaagcggccggcaaagtcgaggaaacagacgcgtaggtcaaaccgaaagaaggccaagcggaacctcgagttcgacaaagcgacagacagtagcatcgagaatgaggttgacgcgagcgatgcaagcaagcaagatacgagatcgacagaattctggaagaagataacggtatgttctttgtgaaatggggggctatgactccgacgataatagctgggagccggagacaaacctcagtgctgcagctgtgaaatccttcagaaagaagaagcagagacttctagcgggcactacgcgcggtaggaacgatggagcagagatgtctaccgtcgaaagcaacagtgcgaggttgcagagtgaagatctagtggacgggccgtgtggacaagcatccaatgtgaagataggcagtcatgtctgctttcggcctgatcgcgagtcgtggatgactgctgcgctgtatagtgaagttagtccaaactacttgactgggatggtttcacggcagcggcgcgtcaagggcggaaacggtgctgttgagtttgaagtacgttggacttcaacccgctaccagacaaagaagcacgtgcactatgtgagctacgacaaggcatcagagggagtgattaaccacgctcgtgctgttggcattgaactcgggccaaatgcctgggatgcgttgtgccgaccgtatcatgaggcacaagagattgatgatatctgggacgacttcgtcgagatcgatgaagccaatgctcgtttcgaaggagccgaggagcttccggaagaccaagctgaagtggagaagattgctgagatggagttttacgcgaatgccgcgttggaagcacccacagatcttttacgcgtgaagacggctccttcgacacaaggctgcatggaaaatacaagcctgttttcgagcactctgctgtatcgagtttcttcgcttacttgccaatctcgttctggaagaaggtagtggagaatacaaacaagtatgccgcaccgctcaagcagccaaaggtcagcttggatgaaatgatgcgcgtcattggcattcttttctacatgacgttagtggataaggggggggggggtattccaactattgggtcaagtagaagacagcattcttggagtgggcagcctgggtctcgagactgtgatgatttcagcacatccgcagcaacctgtgctttcggtatgatgtggaccctgctgatttggctcgagacccagccgctcgagttcgcccattgctgaacctgcttaaggtccgtgcgtctaagttcgttgacattgggcgcgactgtgctgttgacgaaacgagcatcgcatgccgatcgcgctatgcaaggcatctgattttcttcaatgcatccaaacccacgggcaagtatcattataagatctacatgtgctgctgctcgtcgacgtggttagcagtgaagtttcggcttcattgttcgagtgatatggcttctcacctatctggagtggaagacgacgatgcaattgcgcgtttggaggcggcgacggcattttcatccgaagtaaggaagcatgtgattgaagctactcgaccgtttcatgggtctaagagaattgtcaacaccgacaacttctacacctttgccaatccaagttggcagcagtgtaaagcaaaatggtgtgaagtaacttaagtaacatccaaaaatcggaaaataatttctgaaattagtatttagagcaatgtggatttagtgcagagcaaacgcaaatcactggtcagtaacagactgtctccgccggcaacattccccaagagccgaagcatgggcttgcggcccgcacgcctgtgctcgatgcacaccgagaagggcgtgactgggtgctggttgccgactgcaacggcatccctcccactaatgcccgcaacatcgtccaccgccaagccgctgatgtcaagaagagaggcggcgcgcgggcggcgtgcacgaagtgtactccagaaatggaggaagctctcgtgggctacctggaagacaactgccagtacacactcgtgcagatgcaggaaatgcttgcgttcgacttcagggtgcacatcagcacttcgttgatcagtaagacgctttgcgaaaagctttacactgttaagcaggtacgccttcaagttattatgctatcacttttaccatctactgtactaagtgataggttcgcgtagagcccgagacctgcaataatgctgtaaatatcgagaagaggagggtgtttggtgaagcgttgctgaagcatgagctgaacggtgcttttatcgtgtattatgacgagaccaactacaacctgtactgtaagcggacgcaaggccgcgctcctgtcggacaacgcgctatcgtcaagttctctccctctaagggggctaacttacaggtgcagtgcgcagtttcccccgaagtcggccttgtgcactacgccacgcgtcgtggcagcatcaagatggaggtcaatgccgagtttgtggacgaggtatacgacgcggtcaaggcccacgacgtgtaccgcgaccactttctcggcaagaccatcgtcatcgtcctggacaacgcgcctgcccactgccagacggaggatctcgtccaacagcgggcggatctggagttgctacgcctagggccgtactcgcctatgtgtaacccgatcgaaggtacggttagcttatcttttggttcgatatacttagaggtactgaggcgatacaatgtattattgttcaggtggttttagcgttttaaaagctcgcatcaaggcgtatctgggcttgagcaacgatgagatggtctacgtgccgcacggccagaagacggagcgtaggatgcgactgctcgagaaagccgcggagcactgcatgccttgcattgacatgcgccttgttaacaagatggcgcgacactgtgcgctctctgtcgccactgctattcgtagcgagcccatggagtatggaacttagatgtttgctgtggactaaatccacattggtctgtactaatcctcgaaaataaatttttgaaaaaatatttttcgtatttacggcactgtcggctttgccttacactactgccaacttggattggcaaaggtgtacacgtcttgccagcttcttgagagtctgcggttgtttgggtcgagaaaatagcaagcactttcctcggtgcttcatgatctcgaagaaaggcaacgaggcgcaatgaggcaaggagtgagcacgaaaaacaagatcattgcggcctcgtgggttgatggatcggtggttaatatagtctccaatgccgattcgtccaccatgactgaagtggagcgtcgtgtggcgaacaataaagtgaagttcggcgcaccacgttgtgtgattaagtacaaccaaaagatgcaaggtgttgacagactagatcagctacgttctcggttttcggtggcagatggccatacctttcggcgctggcacagaagctagcgatggcttttattgatattgctaggtgcaatgcgttcatcacgaggaagctagctgggaaggggaacaaaggtcgtgaccccatcgtacttttgtttttgagctcaccctggtaaacggaggctggagaaattcactatgtgacactggtctactttacgaggatggatattttatgaactccatcaaaagaaggacttgtgaggacaccaactacgccagtgaaggcatgtatacctcggcgctcgtggcaagtgttcccggactcgcggcgcaaacgcgaatgcgtcatctgtcgcttcgaagatcggtttcctacagaatcgacagtgtattgcggcgagcacaatgtgtcgttgtgcttgcaggttttcgagggccccccaaagtcatttgcgtgtccaaacactctgtggacgtgctggcaaaagttccacaacttctatttgcccaaacaactctttacagcaaacgggaatttgagaagttcttgcaagctactggcagacaaacgaagtgcggcatttttctctccagccatggagtcgcatgtttcaacggatcacgaaggctaacggtgtaatctattggctaggcagtagttatcttcttgtagcaatacacgttctgcacattacttgtccacgttacgacaattcccagtagtattggtggtccgaaaagagcgcaaaacaagcgttgacatgactgtctgtggcgcgggcaaaacgcctccataacgacaactcttgagacatggttgacttgacaggcaagatcttgtagagcttggttagctgtctcctcaaatagcttgttgttcgaaaacaaaaccatagcaccttgcaatagatcgacggcagttccatccaacttgcgaatgtcggtgtatactgcttagttgggggagcacacggccgtgttgccgaacgatatcttcagcaatctcaaccagttcccctctcacctcaatgccgacgcacactttggctgatgcctctaacgccacctgcacaacgacattcccgatcccgctgccaatgtcgacgaagacatctgcaggtgtaagtcgaagatggtcaacaactgatttaacacccgcgaaagtcgtctcgcctgcattgaagtgtgcgcaacccgataattggcgaacatccttgcctttgacgtgcgcaaaaagcgacgatacgagcgattccataccctcgtgggctttagattaaacgatacttgatgctacgagagcagttgatcacgccttgagcactgcgatgcctgaacttcgataaatcttttccataagttttcttcaaagtcttgagccgattttgcagtacctttcgtggtatgccgtaaatactcatggcttctgtgatatacggccaatttggtttccctcctacgctgttgtattggcccactagctttactagcatggcatcttcgtcgtcgctgaagtttggcatgactagttcagttgtgatacacactctagtctgcaggcggggcaaatatatcggataaagtatgacatacacgtatacatagtttgaataattgggcagtagctacgtttttgtcgatgtgatgcacacaacgaactcgctagttcgagagctatggtactagatacagtatggcatactttcttgcatataatctccaaaaattctatgctcacgcttcattgatgactcttttcgagcgacagggaagtagctaatggaaacaatctgccagataggtaatttccttcacgaattaattttagttgcgtacgatacaccagttcacaagataaatcatgtgacacgtcctatgctgccacacattgattggccaaaactatacatttccgatatagccgttccgcaagcgcccgttttgtggccagtgtgagcagaaaacaaggtagttcaacgaagcatgatgcagcgtttttctatagcaaactatccacttttgcaaaacgatgcatcatgctgcgttttggaaacaaaagggttaactcgaccaggtgcagacatgtttcccgaccggaaatccacgcacctcctgttagtggtttctggcgcgtagacatgaatcagtcgtgcgttattaatatctattagagagctttcacaaccagtcctaatccgaattgtacttaatgctgactttatcggagtcactgaccgcacactttggattagaacgtttgggtgagcatggtttcctcgcagtaagctttccagatgacgcaagtgggctcgacgttaaatcgagctgtacaatgcgcatttaattgtcgtaacggagatgtagttaaatgattatcacaccaacaaccatgtggggaactagatttctttattttccaaatgaaaaaaaatcacaagcgacttgggcgcgcctcacttgcggcgcacaagtcgcaataataaaatattttctctgagcttacgttaacactaggacgtatcgagatagtcttgcgttctttgaattcggtcacacgacccgcctgcacaggatcgaggttcgcagcgagtagattatcttgcagtcggacgcctttacgcacgtgctggtagacccttccagcgtaactttgtctttcggggcgtccttgagatcgtgatacagagtcttgacctttcccagcagcgaaggcctcgaacatgccccgacaagcattaagatcagacgagttgtcgataccgcagcaattgtggccgaacacattcgtgctgcacacgtagttgtgccttagctaactactgcctgcatatgaatcaccccctagagcaccagcacgtccaaacgcgtcgcattctacagtacaatcagtgaaaaacaaagttaaggccaagtttctctattttaatgattgaaatcataggagtacctgaagactcaagcgcaggttgctgctccttcctgcccttatgcgagcatcccattcatgtccgttctcctgttcagcgaattctaaaatggcattaatcaaaccggccccgctcggatcgggaacatcatggcctataccaccatctaaaggtcttctggcctatacctttgattttgtccccccctgagttatgtgtccaacactagttaatccgtatacaaatgcttagataaatcgactcaatacaacagtaagtcattcgaatgcatacaaaactcaatatatttgatttcaatacaaaagtcaagaaaataattctggcgataccggtatctgacatccaacagcgaatatgcgtgggcagaaccaaccggtgtgcaaccgacgacaccggtatgattcagtatatatatattcgagcagtgaacgaattgaagtaaagataacgattgaggcggaaaactgtaatagcactagagataagcatttgcattttcaagtataaaacttctacaagctgcaaacaaatctcagccaaggttcgcatttttaattttgtaaaacattgccacttgatatctggcatctacagtcttaaggccaatttctgacagatgctgcggctgcgaagcaggcacaggagatgaccgtagctcataagaaaagtaatcaattaaaatgaagagggagtttataccaaaattctcctatcccagccttcgcggagccctagtactgggataggaacagctgagcgcgatcctgggagtagatagccatctaaaccgcaacaaattcaaattcaaaagtactgggataggaagcgacgaagtgctgatagcccagcccacacaggatttattcgggcgctgtccgctccccccgtttggaccggcctcggaccggttccatcctgatttattcgcagttcgtaagaactgtcgttactacctgtttgatgtcagataccggtatcgccagaattattttcttgacttttgtattgaaatcaaatatattgagttttgtatgcattcgaatgacttactgttgtattgagtcgatttatctaagcatttgtatacggattaactagtgttggacacataactcagggggggacaaaatcaaaggtataggccagaagacctttagatggtggtataggccatgatgttcccgatccgagcggggccggtttgattaatgccattttagaattcgctgaacaggagaacggacatgaattggatgctcgcataagggcaggaaggagcagcaacctgcgcttgagtcttcaggtactcctatgatttcaatcattaaaatagagaaacttggccttaactttgtttttcactgattgtactgtagaatgcgacgcgtttggacgtgctggtgctctagggggtgattcatatgcaggcagtagttagctaaggcacaactacgtgtgcagcacgaatgtgttcggccacaattgctgcggtatcgacaactcgtctgatcttaatgcttgtcggggcatgttcgaggccttcgctgctgggaaaggtcaagactctgtatcacgatctgaaggacgccccgaaagacaaagttacgctggaagggtctaccagcacgtgcgtaaaggcgtccgactgcaagataatctactcgctgcgaacctcgatcctgtgcaggcgggttgtgtgaccgaattcaaagaacgcaagactatctcgatacgtcctagtgttaacgtaagctcagagaaaatattttattattgcgacttgtgcgccgcaagtgaggcgcgcccaagtcgcttgtgattttttttcatttggaaaataaagaaatctagttccccacatggttgttggtgtgataatcatttaactacatctccgttacgacaattaaatgcgcattgtacagctcgatttaacgtcgagcccacttgcgtcatctggaaagcttactgcgaggaaaccatgctcacccaaacgttctaatccaaagtgtgcggtcagtgactccgataaagtcagcattaagtacaattcggattaggactggttgtgaaagctctctaatagatattaataacgcacgactgattcatgtctacgcgccagaaaccactaacaggaggtgcgtggatttccggtcgggaaacatgtctgcacctggtcgagttaaaggttccgtcatgcattgatatcactagcattactaccaagcgaagggccgacaaaccacctaggtgggatatgcatttgagtgtgtttagtaacaggtaaaacttaaaagttcatgcgcaggtaacttgctacggtggtcatttttattagattcgcgtcttggtgatcaggacctttgatcgtaccgtatttcacgcttacagggttttagaatatgcttacgtcttcactgtcttcactgtagctatgtgaggagagcaagcttgcgtaatttttttaaatttacggaaaaaagacaaattaacctacttacttaggttcctcccttgtgagttctaggctagtaatgatgggtatgcttgcttactgcggctagcagacaatacaccacaactacggtagacgcaactagtacaccacaattagcctttcctacgaactgcgaccctcccccctggaggcatcaccggggccataccggtgtgataggtatcctaccggttcagtctgcccaaccttttggagggcccagtgcagcaccgtagtcgtactggtttcaagaaaatatatcaagaggggcatcgtttgacttgacataccacggatataatcctatttggtgtgcgatagcagcactaacgttgcttcctatcccagtataaaccaacattttcagtcatgtgagtatccatcagaacttagtgtccgagcgatagatgtattcggacaagaacttttagtgaatctctcctcatttcccaaagtagggtcatccaagttccctgcccttttaagaaatggccgcgcagctcaagcgagatcgcaaacgccgagagcgagagacgaaagaatacgaagctcaacggcaacgatattgcgaccagccaacattggccgtgtcgggcagagctgccttttgcatgcgagatatcgacctgcctgcagcgagtgacacgagcggacattgtacggggtttgccgtctcgacccagggcttctttctcacggccatcagtgtctccgaagctcagcactgacaaatgtctggcagaagacgacgcatcaaatgctacgtggagcaagtcaaggacttcgatgagtacggcgtgactctgatgaagcaggagcgaggcgtgccgctggcgcgatgcctgataccggaaactgacctggaagacggccaacaggtcgtggtggctgggataggcatgatcgagagattccagcaaacggtgccgctggggttacgcgctcagattgactctatcagcggcggagtagtcaaggtcgacaacatctacgactgcaccgccggtggaccgatcctaaacccgacctccaaccgctttgtcggcatgatcacgtccatcgaaaaggactcgtggctgaagagcggccgggcctcattctgcccactgacgctgagctcgccgttatggatcaagatcggccaggccatgcagcgctatctagccgagcgtcttagacacctgccggtccaaacgctgtgaacaagggaccaaaaagcaccccaatagcatcgatttatcacttcaacatgatccctctcctattcgatatggctacagctaatcatcttcgtcgcatttgatcacatcgtaattggccgtagcgatgcctgtccacgcgcgcgacgaggccgcgagctcggacgacgatggcccgatgccgatgccgatgcccatgccggcccagccggcgaggaagaagcacaagaagctgccgttcgaggccgcgtacctgcgcaacctgccgagcgcggccatgtacgagcgcagcttcatgcaccgggccgcggtctcgcacgtgctagtggccccggagacgcagttcgtgatcacggccagcgtggacggccacgtcaagttctggaagaagatggccaagggcatcgagttcgtcaagcactacaaggcccacctcaaggaggtgcacggcctggccgtgtcggccgacggcctgcgcctctgcagcacgtcggcggaccgcagcattaagttctacgacgtgctggccttcgacatggtcaacatgctgagcgtggccttcacgccggccgagtgcggctggatctcggccaaaggggccatcgagccgaaggtcgtagtggccgacaagaacagcccggccctgaggatctacacggccgagagcgcggccagcgaacccgtgcacactatcagccagttacatgcggccccagtcacggtgttggccttcaacccagtggccaactgcgtcatctcggccgaccagaaggggatcattgagtactgggacgcggacacgtacaagttcccgaaggacaagtcgttggccaagttcaagtttaagggagagacggacctatacgaactggccaaatgcaaaacgtacgccacggccattgacgtctcggccgacggcaagagcttcgtcgtgacggccaaggacaaccagattagggtcttcaggttcgccacagggaagatgcggcgcaagtacgacgagagtcttccggtgttcgaggacgcccaagctgacggaacgctgcacctcgacgctttggactttggccgacgtgccgccgtggagcgagagctggccaactcggacgtggtctccaattgcgtgttcgacgagtcaggccatttcatcttgtaccctacgctggctggtatcaaggtgttgaacatcgagacgaacaaggttgtgaaggtgctgggtaaggtagaaagctcggaccgcttcctgcggctgagtctgttccaagggaagcccaaggtcaacacgcagttcgagaagcacctgaaggctgcgtctggactcaagcacgaagccgaggtcatgtccgactccgcaaatgagcgcgacaacatcgacccgacactgttctgcacgtcattcaagcgtaaccgcttctttctgttctcatctcgtgagcccgaggaggacgagggcgaagacggcagcgctggtgccggccgcgacgttttcaacgagaagccaacgctcgaggaggcgcaggtggccacggagtccagcacgtccaaggtgcttggtgagacggcagtcatgcacacgacgatgggagatatcacgctcaagctcttcggcaaggagtgccccaagaccgtggaaaacttctgcactcacgcgcgcaacgggtactacgacaacctcatcttccatcgtgtgatcaaaaacttcatggtgcaaaccggtgatccgctgggagatggcacgggtggcgagtccatttggggcggcgagttcgaggacgaattccaccgcagcttgcgacacgatcggccgttcacactttcgatggccaacgctggtccgggtaccaacggctcgcagtttttcattacgaccgtaccgaccccgtggctggacaacaagcacactgtgttcggccgcgtcgagcagggtaaggatactgtctcaaacatcgaaagcgcgcgcgtggacaagtccgacaagcctctcaaggacatcaagattattaacattgatatcttctaggtcagggagctctggatccatcggttgatgatgctacaggaaaaatacactcaatggatgaagacagcttcgaactaggctggagatgtcgctgggttcccgctttctattgcgttgccgattgtaccagtacctccagcggtggcgctgctactgttatcgttgttaccagcattcgctgccagtgcgagtgccgcagtgtcgctcaagctcttcaaccggtcgccgcagagaaagtggcggtagatctgttgacgagcgcgcagccactcgagacggtttgcagcttggtgcgtgacgtagcggaagcagatgcggccagcagcggggatggtgttggtttggtacatggagtagatgatgaggacggtggaccgcgtgctgtcgatccggatcatgtccatggggcacgagatcgacaagtccacaagcgcacgtagcaacatcttctcgtcgtcgcgagtgaagtccacctcgaagtccatgtccacagccagcggcatgatcgtgctcaaatagcccaaacccacgtacactcgtggccgatcagtcatcgcgagacgctcgagtaactcaccaaagcactccaagtcgacaatcgcgtggtgcatggccaccaacgcgcgcagtcggcctgactcgtagttcttcgggaagtgctggagaacgtggtgggcttgtcgtgtgagtatccgtcggccggcgatggcgagatggaacagtaccaggtgatacttgagattctgccgcttgtggacgggcacgtagatcgcgcagacctcagcgccgacctgagctagcaaagtggccagctcctggtctgtcattgccgtctgtgttgcctgaattaggctctggtcgagctctgaattctccgggaagtccaagctgtggtcttcaatgtacttgtcctcgggccggatcggcgagacgtagtcgaactcgaggattccttcgtacggcagtcgatcgaagaatgtgtacgtgagctgaatgggcttttggttgaagaagacgttgcgccagtagaagccgcggccgtattgactgcagtctgtccgcttgggatggtatcgggccagggtggccgcgtggtgggcgttcaacgaggcgaaccagagtgccagcttgcgatggcgcgtatctcggagtgtcagtgtccagtggcccgttgggtttgcggtcgagaactgcatggtgaccgggccgaagcgatcgatgagtttccactgctccgcttgagtcaagtgctgctgcaggaagctgaagacgttatcgccgtcaattaaacacggccacagtcggccaaggagctccagctttggcaacgaagggtgcagatgagatacgaagaacgaggcttgcgtggtcgttagctgcaggtccgcgagcaccaagtccaatagactgatcatatcgcgcgaggagaagccgcgtttgacgatgtggatgaggccaaggcaggagtcctcgtctagccaagacacaggcccgcgggggagcggtgggggcaggaatgtcgctgctgcacgcagagttcccctcgcaggcagcttccaaggtgctttgctcgagcccgctacgctgtagagacagcgacgctcctggtctacggccaagacgaacctcctcttggccgacttggcccgggctgacttggccctggccgatctgctcctcgccgtgctggcagcggatacatcgcctctgcctccatcctcttcgtagctgatgtctgagagcgcgcaccttccttgaatcaacgcagcatcgagcaattcactcgcgacagcgaaggcaaaaggagattcccctatcctgagctcaaatggagaagacgcagacggcagcctggcatcgaagatggcggacgtgttgccagctcgagtcgagccaacagatgaagtttccaggtcgtgaacagacaagttgatctcacagcgcgagcccaacgcaatagcacgcagaagagcgcgagctccgatttctccaaggctgttgtccttcatgtccagcgtctgtagagagcggttttgacgcaagaagaagccgaaggccacggcactcgctccggtcagtgcgttgtgcgatagatcgagttgcgtgagcgtcgtgttgcatgccagcgccgctgccaattgctctccacctccgtccccacatcggttcatgctcatgtgaagcgttcgcaacgaagtgttggtgcgcatcgcgatccccaaagccacagcaccagtacgtcgaatgctgttccaagacacgtccagcgcccgcacgttgcaagtgggtgtcgtcagcatcgcaccgagcaggattcctccacgctcaccgagcgagttatgcgaaagattgactcgtttcaaggacggatgtgactcaattgcagccgcaacaggagcaaacgcctcgtcgtcgccgcccagtgttgtatgggatagatccaagtatgtgagagtgctgcagacagccagaaagcgggcgatctgcttacacccttcccgaccaacttcgttcttgctcaggttgagcacagtgagcatacacccggactttagcgaggagttgtcgacactgtcccgcttatgccgctttgcagcagctagaagcttggcctttggggatcggtcgtcgaaatcttgagtgtcatccgcttcacggtccgtggcggccgcaagggattccaacaacgggatgatagaagcgtcggttaagcggttgtcgctgaggtctaagacctggatggcctggaattctcgaagtgacgtggatagagcgatgatcttggcatctccaagcccgaactgttgcagctgaagagctagatgacgcttgccacgaccaggacgatcgttagagtttttactcctggaattcatgagtaatgatgccactgcagcgaaagaagaaggcgctgaggatgattttcgtgctgtgggaggttgagaggtgggggctgccacctcgttgatcctcgagaagatcggctcgggtagaatctgcgtcttgacgcattcgtggtagaacagcgagcgcggcgagagcttcccgaatagctggctcgcagtttgtcgctcaggttcatcgtcactgtcttcatcaggccaagaaaacccgtgatcgtcatcataattgtcggtcttttggcgaattttgtggaaagggagagggctgagctgctgatggtgttgtgctacttgtaccttcttccactttggaaagagatgctgtttgtcggcgtaatactcgatctgtccagcgttcgttgtgtgtttctggatcttcttgatgaactttcgagcttttgggaggcgaggaattggctgctgctgttgctgaggtgattcagcttcctcataaagccatggaacgatcggatgattttcgagtacatttgtatcggtgcttaccgcgttcaatacgctcaatttcctcgatggtaggccatcaactcgctgctccagtctcattgcacctgcttctctcttacgcagcatcgcctcggcgtcttgaagcttctggtcaaacctcaagcgtttactgtcgacttcttgcacaataacgggtgcggcggggctagcaatcacgtgctccagttcccaactgactttcgatgtattcgcgagtacctcatcgatggttcgtggagacggcatggccttgtcatcgagagtttcatccgtggtggcgtcttcatctggagtcggttcctcctgcgcgtacagcggctcaagcctcagactcgggtacatgaacttctccacttcgccgtcaatggtggccttccacttgctgtcgagcgtctcgaacttaccgatggcgtgcttctcgtgcggtgttttaactgtgtttttacgtgttggggaggtgagattgatccgtggcaagacggcggggtctatcggcatcaccgacttccgtcgaactttgacagacagaccttcgatcttcactcgtttctcctcctcttcccctgcttcctcttcgtcctcctttagtggcccgtgaacgccgatatggtatttgcgcatggacttgagcttcttcagcgtcatgatctttgcgtgcgtcacggtggtgactcctcgcactgcaccgtcgtgaacgggaggccgatgcttctctgctttgaacgtctgcgcccgactggttcgtcgcgatgccgctcgggccgctgcttcctcggggtccccagaatcggctcgaagcgtaatggcttcggccgaaagcgtgagcgagttcaacaactcctggctgcggaaactctgccgtgatcgccgtctaggctcccgaaaagagggcgcgttgttcatggtgtttcgtgcacaatagcgttgagatgaagagatggcatgggatgcggtgacaccagacaaattaagactcgacattagtcaactttggtgccaattgagactgtgtgatcgaagtcttgataacggcgatgagttgcccagacctccatctaaaatggaaaacaaacgtcgaaatgaatcggatgagtacgttcatgacaatagcaaggaatattaaatccagaccccactcggcttttgcagtatgcagaactcaagctccatcgtttcttccgccagcttctccccggcctttgccagctcaccaatgccattgtcgatctgcggtaaccacgacttcaggaagtactggccgtattcagtcttgttgtggtgccacgtgacgacccacacgtcgatgagctgcatcgttgcgtggttcagtgccactttctgcttggcctcttgctcgatggtgtacaggtcgacctcgtaccacttgtcgctccgatccacgttgacaagtctcctcgtcatcgtgatggtcttggtgcgttgaatccgatcttccagcagactattgagcagctttagcccggccacgaaggtctcggccatcgcgacatggttgcgctgtactcaacaacaaattagtaaagagtaccgttactatatacatccacagcacacgcaccccttttttcttgcggaatttcttgtcatacttccgttgtaagcttaggcaacgtttcctggaagcccggaacgtgatgactgctaggggcagatcgtcctcggaatcgctctcttcggtctcctcctcttccgagttgagtgtcgccagcgaagattcgaggattttatcgaggagaagtgcagccgcattagcgctggtgatgtcttgctcctcaacagaggtaggggatgcagggatttcgctgtcgtcgaactcattcaggaaattctccatggattgcagctcgatgtcgtccatgggtactatatggtgtggtggccccgagggaagaagaagaatgaaagaggccaggtgtccaccctgatacgcagagaagcatccgatctggggacgctgaagtgaagacgaccgcgtcatcatgtagaaggtgcatggagagttccattagaccgctgcatctttacgtctacactacaactacaactattacagtatacagtactactcggtggattaacagcaactacacccacaccccgttgggcttctgctccatgcaccactccagctcggtggtcgcctctgtgagtttctcgcggaggttggccaggccttggatgtagaagttaatgtccaccaccgtgtccttgaggaaatatttcccctgttcaagcttgaccctcgtccaggtcgtcgtccacgactcggcgtactccgtcgccgtttggttcagagcaagctgctccttgacctccttctcgattgtcttccggtccctctcgcatgcagcaattggttgagtttcctgctcgagagagaccaatctcctcgtcatgacgaccattctcgtcctttcaacgcgatcttccagcagggcgttgagcagcctcaacccggccacgaaatccttggccagcaatatcttctcaatcttaatccaacaaaacacggcgttagtgtagagcccaaaaccctgtaacaaatgaccgaaaactttaccttcttcttgtcgcggtagcgtttgtcgtacgccttctgcttcagccgcttgatctccgcggtggtcgctgcgtcgattagtaggggcttgatgtcttcgtcctcgctcgtttcgtccgaattgaaggacgccacggaagttttgtcgtcgtaagaaacttccgacgacgtgtccgatactgcacaaggctcggtcttgatcacgacggcagtatcgttagcgttgaccgggccacccgagtggaacgacaccaaggtgttggccacgtcgttggcgatgtccatagtcgcggggccgctgaaaatctcgtcgaggttggcttcggccacgaatttccagaccgaggacatctcagggtccgtcatgctcgagtccgtgaccgtgacgcagcgccaaatgaagagtgaggggtccgtccgaccgggggcaactcagacgaccgcaaatgaatcgcgtgtcttcagtaccctcgagtgcaacgtctgggtctggggtagccctgcctgccatcggcatcgtgcggttgtcggggggacatgaagctcctcacccactcgaggacctcgccgccaatgggtccgcgcttcgtggccagcgaacggtgcaagaaaaggaagaagggggacgccatgtcactctttggcgactcgggcaaaagctcccggaaaaaggtttccttgaaccccgtagtaaaattgtcaaaacctggccgagcttgtatttgcttagtaattattgtgaaaaccgattagaatgtcttattggattgtaaatcggccgatttagtggtttattaagatataagatccccgatttactaaatccgacctcctaattagactggggcacatcgatttagcctcaagattattagcaagggcgacttgcagagccaaatcatatgcatcggatttaggtttgctaatcagccgatttagccagagctgaccgatgtgcaaccggcattcgctccttgtaggctaaatcagccgcgcagacaacaatcgttgcagtcgctcttggctataatagtcaaggcttcaatgctaacagcaggactaagcaggaaaagctgcacgctataattcatgcaactgagatacggaggcgacaggttgagtctcgggccgaggtgatgtctgttgatcgaaaaggctgcacataattacgagaccgatgaacgatttatactccgattataattgaggcatccccgatttagcatcctccaaatcctctgtgagcgatgctttactggtcgattcagcaggacaaactaatcggttttcacaatagcaggtaatgtaatgtattacgttttcgcgttgccacactatgctgtcgctaggctcagctttgctagtcgacggcataaggtggtgtccgcatacgtcgggtccttcttcgccggcagtgcggcgacaattgccctctcgagggctttccatttaagtttctcttgtgcaagcagccgaagttggtccaggtcacggcgggtctcgaggcgataggcgacaatagttttgtttagtttctcatgtactacgtagttgtgcaattttaacaaatacttacgtccgtcacctgctattgtgcaggtgacggacgtaaatacactgctattgtgcagatgacggacgtaaatatttgttaaaattgcacaactacgtagtacatgagaaactaaacaagactaaaacgtaaaggtgagcgtcggtcctccgagtcgccaccgcagctcggcctggacagaagctaactgctcgccaaccgccgccagcctttccatctccagctcgatctccttggcctgcccgcgcatgaagaacttgcccgtctcggtcgatctgttctcgctccatttgagcagccactcgttgctcaacttgatcgctctttcgttcaccgaccattgctggaagtgagcggggggcggcgcactgacgccttcgctctcgtctgcgaggcgcagcaatcggagcaccacctcggtctgccccacgcgcttcgccatcagctccacgaagagctcgagcgcgggcacaaacgtctcgcacagggccttgtgcgacaactgcttcttggaccgggattttttgtcgtagacccgttggcgcgcgcgctggagctccgacttgggcacgcgcttcttcttggtcggggactcggtggccgagggttggccggccgcgcgcttccttgaagacgcgagagcgacggatctcggtgggtcttcaacgtcgctgccctcatcggtggtgacgcccgtcacggtggacgaggaggagtccgtctcgtcgtcgctgcagacactatcgtccgaggccggggctgcgtcgtcgcaggtggccaggtccagccggtagatctcgtcgaggctcagctcgttgaggaactggcacacggcggtgagctcgtggtcggcgactacggccatggtgcttggtggttgggcgcaaatcggcgaatgcggccacgaaaacaaccaaacgaggagtgcttgaccgaccgtcgccggcccgccgaccggcatggcttcaagtttcgtccgggagatctcactcgattgtccatggcggccgctctcctccttctcgacactgagttgggctacggctactctgggggcgacgtcaagtggccaatggcctcgtgcccacggctgtcacggccacgggctcccgagtgtgagtgtacgatggggaggccctctgcgcctgctgccacggccgacttggccgttgtacagaattctgcccgaataaggaacgggtgtacaactaatagcctcccatatttaatattattttccagtcgatgtggcgatagggggatgtaaggtactgaggtactaaggtgaaaaatctggtgccaatcatcagctctccaccctcgtttgaaaaatggcgcgcatttagcgatcttactagacttcaaactacatgtaccgtagtggtagactcgcacttttgcttttgcacctcgccccacaagccccactccacccatgaagtccacaccgtccaagcgtctccgcctcacttaaaatgatgcgaccggcttggtgaagggctagataatccctacgaggtcgaccagttgacatcgctgttgtggtgcgaggatgtctggtcaaaggttagtgcttcgaccatacgccactgttggaatcattccggactcgtaggtaaagctgctcttcagttcattttgaaagaactaaatcagtacattggaaaagtatactcaacttaacatcaatttatatattatgcgtctttatatatatcaggcgttccttactcgggcagattactgtacatgtattaggtagatgggggacatcgctggacaagcggacagacaggtcgctcgcgccatagatctctgaaaccttagcgacgtttcgccatgatggatacgctgtcctggtagccatattttggtcgctccgaggacacctcgcgctcctggacgctgctacattgtcatcgtgtgacgctgcctggagcctgctatcaacgctgctgatgatgaagattcgaggtagaggtcgcagggcgctgcgcgggccagcttgacagatcccttgacagcggggggattcccgcttcgaagccgcggctcgtctgcgctggtgtcacgatctccgcaggtacttggacgctggtcctctaaaagttccggccaacgcctgacccaaccggattcccagggcgagcctccgtgatcaaaacgcagtcatcggctgaagcgtgcagacctgcaatcgacgaccgacagcgtggtccagcaccacccagaaggtgcttgaagttagacagcggggaacagcgtcaagctggcctgcacgcaaccaccggtggccttctcatcacactctacgcatatgcaagccccacagattccgtcaccttcgagaacagtggaacttccacttttaaaggtgggctagttgaacccttcagtcattgaagtgggtcgttgtggatttgcgtgcacccaagggagaccatcgacgacgactgcagtttagagaaagaaagccttgtgcttagtgcgcgtttagtgtacttccttccgctgcatggccgacccgactcctacttcttcgttagctggcgcttcctcgtggttcaactttctcactgccaagagcgggaataaaaaaataaatgagaataatgaggcgatacgtagatacttcaccacgtgaagtcgagcggctccatgggcgcgtacgggtggaaccgccttggggccagcacgccgcacgggccgatgaccttgacggcgctgtgccgccactcgctcaccgtacgcagcgcgtccttgtccgcgtactcgcggatgcgcgtgatcttctcccaggcctggagcgacttcagcgcgacgcggtcctcgacgagcgcgcgctcctcttgaagcagcagcaacatcttgcgctgcagcgagccctcggagctctggacctggtggacgtagggcttgcagtgcttcctgcgcgcggcggccagcttcatctcgaggccgagccacgtatctcgctgcaggttgaggtttttctgtgaacacacacagtcacggttggttggtgttgttgtagttgggcttgagccggcaatgaaaggctgaactcactctcttgcggcctcggtagcgcttctcgtagccgcgctggcgacagcggaggcgctcgcgctcgttcgtcacggggccgacgtgcaccacaggtaccggcgtcaggaagctgtgctcggcaccgacgctgaccggcacgggctccagtttgatgaagatgtcggcctcgtccaagggtgtgagcttgagtggaggcggcgggtggaatagaggcaggagggccacggacgagggcgagctgggcgcgttgcagccgccgccgaagctgaagctgcagtcggcggccgaccggaagtcctcgagcagcagcgtcgagtgcaggtccatgaagtgcacgtccagctcctcggcgaagaggtacccggccgtggggtgcatggcctcgagcatgaactggtcgtccatggcaagcaagcgggtgggcgaaggcgaattggcgactgattgatagcggatctcgtggcacgcacggtctctcctgtctctgttaaaaagggtcaagacggcgatcttccggcagtcatccgcaccgaagagcagggcaacggcaatgaccagcgtgaccgggccggagctcataaggcaggagagtggcattcaggaacattgcgcgcggcgtgcacggggatgagcgctaaggcgggcaacgatgtctcgccgcgcgaaaacttgggtgactcgcccctggattggacgtgcacgcgcttgaccgtaagcgtggaagccccaggctcactttgcttgtgattcaagaaatcgaaccaaatttatcgtgagcatatagataccgtagagatcggctgggcactgactgctccgacggcgtttcggttgcgatggttgccggtcccaatgtgggagactactggcttactgctttgcttgctgctctgcttgccgtgcggtgtttagcttggcgaatactacacatgtagtgctttagatgatattgtcggtgtacggcctgtggcctatccatctcagcgtgagatgtagagggcgaattcgagtcgagggcgacgtgattagcgttcggtgccctggttctgccggttctacttcctcgtacttcggttgcgttcccaggtacgactcgtactacgagaactgaagcaaaggggtgatggaccacacatcactttacctagggagacgacggggtctaccgtctccgcgggagctcaattgttcggcgggaaaatggccccgtgccactgcgtgacctgaccgcaccgaaagccaatggggaaggcgagacgcgtctgctgtcatgcgatggccccacgctgattttgtttgcaaaacagcgaagggccttcactcacactcgcagattcgacagctcaggcgaccatgagcggcagcgtcgatggctcacggaccgtgggcggcgggcggggcgagtggagcggcgttggccaagacgcatccaggcttgggcccgtgctgttcatgaggctgctcggatcgctgtacatgtatgcacaatggactaaccaatctatcgtgttgattacgagacgtgtgatgcaggatcgaggcccggccccaaagagggagaaacaaccctcccttcaacggacctgtcgctgcatgtagtgaagggggaccctcgtgtaggcccgtggctgcgatcccaaaggcaagcgccgatgacactgctccatggggaggctggagctggccgagctggaggaagtcgcgctcacttcacgcgcttgctcaagtccgactcacgcggacagtattctggacgtggccaaacgcttggtggactcgtggaaactatgcggcccacagtgtggaggtgtactacaagcgcgctcgacgacgcaacctgtcgagggttcaaattggtgtagccttgcttgccttacagtgacactgctctggtcggtacatgcaatgaatcactgaccgcttttttacgcttgaacgaacgcctccactgcaacatttgtgccgcctcattatccggactgcatccacagcagtgggacgtctgagttctggggtacatagctcaaatacatgtacacctttgcccagccatagttggcctaatttgcaagcaaagttgtcatgaatattggaggtaccagagagtaacattacattccctgaagtatgactttcgtttcattcaaagttgtctaattcccaccaacgactgttgacgtaatacacattttccctcgcaaactcaagacctttggcgtactctgatagagtgcgaacttcgcactgcgaagtgacgccagcacagaggcaagatggcgaaggcgaaggcgtgtgtgcgtgcgtgcgtgcagcttcttgagtgtccgatccgcgtctgcatgcccttcatcaagcggcaactgtacgcgcgcgatctctcaaggaggggaacatgggggcgcgttgagaccgcccctcactgagcagggggtgagacgtgctttgcggctacatgtggtgcatgtacctctcgatgggaattagacaactttgaatgaaacgaaagtcatactttagggaatgtaatgttactctctggtacctccaatattcatgacaactttgcttgcaaattaggccaactatggctgggcaaaggtgtagtgagttgccgtccatcccatgaggtataattcattacgcgcgccctccgctcgccgacactccccattttgctggaaatcactcactttgagagatgcctggcgatggatctgtaggaagccaacgcgaggtatccatagacgatgtagcttatgaatgcattagcctggaactgacacacggtataaattgttgtggacagcagtggacggccacttctatgctacgccgcattggccagctggccgacacggatataactgcgcagggacctcgaagcaagcaaaaggtgggtgtataactatgcaaccgctcgacgatcgctactgtaggcgagctcgtgttgatcactgctgctccgtcgtgatcttaccaggcaaagcgcattactatgaaggctatttcgctcgcaaggaaggacgagttccagtaccttcagcagcacgtggcgctggacaagattgcacaccaacgccacgctcgaagctgcgttcatggagtctagcacctaaaccgactatattccagtggataacactttacaaaagaaatcgaactccgcgttccttatcctcactggtctccttacggtacaagttgacgccatcctggacgaacgtgtagcaaaaattggcgagctgaaagcttcagctaaaatagttgagttcccagtctaactaagcaatgctcatattaatgtgtgattgcgtgagaaaacagagttgatgtggtcggtgtacagtatggcgctcaacctgccgttctaacccagcacgaatcgtttacttgtaccttgcaacaagcacatacaaaactttatctcacgccatcccgaccaacattgccggacgttccagcggaaccggataacgacaagccttcattcgtgaattacgaccgtagctcacttcgagatcggcaatctaccacccaaagcaggaccaagtgcccaaacgcgttcatctcatgcgtatgaattacttgctgctgctgttgctaggcaccctcgttgtctgttgtcagggcctccctaattcgggacacaacaatcagatcgcagacctcgaaatcgaggccaaccatgttgtccccgccacggaacaatatattacaggtcatgaacggatttggtcacgccctttggtcacgccatcttatgattgtttgagtcatatacgctgcttgccctgccttgggaggcctcaaatctgctttatgcgtgtcgtgctgcatgcaggcatcatgttgagacgcttcgaagctgtcatctttgccaacagcgagcaaaacatcgttttttcgtccattttcggtgtagaaccccccaaacccgcccaacccgggtttattagctttaggacagctatttagatctcgtggagggtgtggcttcccttgaggtgatccttcatcgatggaaagtgtccttgagtggtttctcatacttagcaccagtgtaagtcacgtgaccaaagctcgtgaccaaatccgttcatgacctgtaataatgattacccccgccacgacacaccggtcccttcgggatggagaatatgcaaccaatctggacgctgctactactgctgacgatgaagacgaagagagggggttggcactcgttaccaaactgaagactctcgccaacaagttcccaactctcgacaagtacataactctgatgcggaagaacccggaccctaagaagttggaggcaatggtgaagagcgacccacaactcagcaagctcaagaggacagtgaagaggagcggactcaagataaccacccgaaacattcaacgagtgaggtcgatttcgttggcggatgcgactggagtgaacagactgaagatgttgtttctactcgtggtgctgtgcggattgcttggagctggtgagtacgcgttgttcttacttattgaagggctggcttcgggcggaattacagctcccgtgggcagggagataccaacataacgtgcattggatggcgcgacgacatttttgaaagaaaaaaaagtgaaatcctttcaaacaaagtcgtggttcgcccaaaaaagccctgaaatttagggggttccctgttaacgctggagaacactactttgaactggtggcgtatatttaggcacttatttcggagcctgctggaacctggcatggagcagactactttgaagatcgtcgaacaagcacctttggacctgtggtttgcttcatttcagcactaatgacaagtgcacttggcctttatttgttgtgtgtaaatcctcgttgtcgtctacaacgcatctcctgcgcctacttgtggtgtcgagttcgggcttgaaacgcggctcacttcttctctcataaaatgggttttccaccgctatgcttgttcaaaacacctatggtttgcaaagcagtgaagggccttcacactcacagattcgacagctagggaggccacgagcagcagcgcgtgtctgtcggagcgagaaaaagctctcgatgccttggagcggtgtaggtcaagacggacccaggctttggccctgctgttcatgacgctgctggagatcgctgtacaggattagtagtccattgtgcatgtatgcacaatggactacgattaaccaatctatcgtggtgactacgagacgtgcaatgcaggatcgaggcccgaccccagggtttggcactcggtgcgaaactgaaggcactcgccaaaaagctcccttctctcgacaagttcaagactctaatgcggaagaatccggaccccaacaaattggagtcgatggtcaagacggacccgcaactcagcaagttcaagagcacggtggagcaaagcgggctcaagatcaccacccgagacatccagagcgtgcagtcaattgcggcgaagaatccaagtgcagcgaaaagatccaagactttgatcgtcttcttgctttcgtgcgtggtgcttggagcaaccgcgtcgttcgcgctcataaaaaaactgacttcgggcgggtctacggctcccgtaggcaggcaaatacaaacagactgtaagcgcatttgggcgacgatttttgaaggaatcggaaaccctttcaaaatacttattgtcgaagccatatctacttgaccgggtatttgtaaacaaaaagtaacaaaagtgtgaactagaattcgcttggtatacaccataatgcaggccatgcagatgcagcaggttcgcgtaccacgcgcgccgcaggtgcctgttcccccggtgagcgccacgccgctcgaactctcgagggagacgcgccagcagctgcgcgtgactcggcaccgcgcctttgagcggcaccaggagaacgcgcagtggactcagcagctgctggacggcgtggagggcgcagtcgacgcggttgtggctcccagcggcctcagtgcatcgcttgaggagctgcaaaagcgggttgaggcacagaagaacgcggcggagtcgctggaacgggagctgaagcagcagaaggaggcgcaggaggcggaacagcgcaggttggtttaccttttcagctgtagcttttgcgttcctaggtggaaagaggtgtaactttttgggtgcattaatgcacaggtttgaggggatgctggtggcgctgaaggcggcgggggatgcggctgcggcgaagcagtgcgaggagatgctggaggcggagaagacgcggctggtgaccaccaaacctcgcaagatggagatcgtccggctatagacgacgatatcgactgactattggattgagagggaataactatggaagatcaagacaagagtgtggatgcaagtgcacgtattgtggcacctgctggagacagcgatggaggcggagacagatagagacggccctcgcgcagcttgaattaatgtgggcaagttgcagcgaaaaagactgcaactggctaatgaatgccggcgctgcagtgaagaagaagaaatcactcaacgtaggtctaaacacactgcaccaagctggcagcagagagcgcatgcacacacgcagggaagcgcaggtctccgatcaacatggctacatactccatctatattcgcacttagtcgggttctatcgaaacgaaagttgggttcattttgcctttcgtatcctcgagtacgtcatcaatggcgaccgtgcaggagaacgagagcaagctgctggagccgtacgcgtacatcagcgagctgccgggcaagaacgtgcgcggcaagatgatcggcgccttccagtcgtggctgcgcgcgcccgcggacgccgtcgagagcatccagagcatcgtggaccagctgcacaacgccagtctcctgtgcgtaggggcccctccccctccctccgttctacagcccagcccccactccgtcgttctaccattgcgatgcagctgacaacaatttctttatcgtcgtggtggcagcattgacgacattgaggacgactcggagatgcgccgtggccagcccgtggcccaccacatcttcggcgtgccggccaccatcaactgcgccaactacgtgtacttcctgtcgctgcagaagtgccaggcgctgggcaacccgcgggccatgcaggtgtacacggacgagatgctgcggctgcaccagggccaggggctggacatcttctggagggaccatctgcagtgccccacggtggacgagtacctcgagatggtgcaaaacagttgagtgccttgtcttccagatggacccttcctttcaagtgtccacctctgtgagaaagggtttgcgtcaaatgtaataactaacgactgtcctactgtaccacagagacgggagggctcttccgcctggctgtggggctcatgcaggcgttcagtgagtgcacgctggacttcacgccgctcgtgaacgctctggccgtgtacttccagatccgagacgactacgtgaacctgctggacgagacctacatggagaacaagagcttctgcgaggacctgacggagggcaagttctccttcccgctcatcgtggccatccgagagaacccgcaggacacgcgcttgctcagcatcctcaagcagcgcaccaagagcaccaagctcaagcagtacgccgtgcagtatctgcgcgaaacaggggcggtggaacacacgctggccaaactgaacgacacggtgcaacaaattcgcgacgagatcgcgtcgctaggaggcaacccggcgctagaacagatcgtggatggattgcatgctacagtcaagtagaaccactttttgacaagacgaatgtcgaatctacacgtctatttcatgttaaagaattattccgcttcctgtttaggctctcccacctccacccactccatctccagctctcgtgtggtcattgcagtgtttgatacgctggtttgtgctgtcggttgcaggcggaactgacagaacttcgtcgtggagtttgacgacgcggaagtgttgccatcgtcgatatccgtagcgcggctatacgtgcagacggcttcgtagatgtccatgaagcagttgagctggacccattcctcgcagtcgtcgttacttacgcacgatatcgtgtccgccccaacgtcttcgaagtcgcaccacctgcctccggtgatctgtaggtcgaacacttgcacgtcgtccacataagtatggcaggacgggaagaacggctcacccgctgcagcattggggaaccagacgccgattgatagcgagttagtcgaatcggtcttaccgtccatacccacttgcttcaacactagctggccgtccttgtagaggttcgcgcgtgctgcactggcatcccattgcatgacaatctcagtgtacgctgcgtcgtctgtaggttctggaggtgtcagtgtgaaggcgatattaggagtcgtcttcgcttggtacagagcggacttccatagcggcaggaacggtagagcgctgctagtggcagcttcgtagctgccccaccaaacctgcgtgagcgtaccgaacgcagcacacggcttgattcggaggaccatcacacctgcgttctgttccagcaccgacgtcaccgcagctccgacacgtcgagcaggacaccactccagaggattgcaaggtagtggactgataccatccagagcccattccatgaatcgatcactcgtagtgcggtctgtcaatgtgccgtcgctccccatagtcttgccaattggcgcaactccggcgtatagatctccattagcagtcagctccagtacactcttaccaagtgcagcgtctcccacacagcgcacgttgtccgagctcacgcctccattgacgttgctgccaccccattgactcgtcacagcattccagttcgtattggtctgcatgttgccggccccaccattgcccgggcatttagtaaagtcgtcttgcatgagaagtacatgcgcgcaggagtcatactggtaagccgatcttcctgcgcaacatttatccagcgtgacagtgatatctgctgagtcgctgtctttgagaccatctaagcagctcacagccgataccaacacggctccagcgcctacttccaacggagactggtacagatctccagaggtgcaagttaacgccttcttgtctcccgcagacaagatctggtagcgcacagtagcgccaatagtcaccgcagcaaggttcaccactaaagtcagcggtttgatcgtactacacgccgtgctatacgtcggcgtcacagcctggacgtctacagggccccatgtggcaacgacgctatcggcgcagaccacgccgacgcaacacgcgacggcccgaacgacgtcgaaaactttcacaaccaactcgattcctcccgaggtcagcgcgttgctacacgttggtagttttttaccctccgacaggaccgagtaggcaatccctagcttctggtcgttggcacttggaggaggaacgatcgtgagattcatgaatccgctgattgtagtggacggaacgacgtaagtgaatgtcggcttgcgaggatgcactatcagatcctccgactccacgagattgctctgtagtaaatccgttccacacgccaccgcccgaatcttcgcattgaacgtgacagatactttcccagttgtggcatttatcgctgaaccaaatgtgcagcttggaattaacaaagaccctccgtctacgccatccagaggaacggtgatgtagcggatgaactcgcagtcggtgcactggagatcaatttcccaagtgtcgacgcttttcgtgatgtccacggagctagagatactcggctgcactgcttgaaccaggaaccgaggggagcgaacgggataactactgataaccagatcgctgactgatagacacgccactgcgtgcacgtacccgctcttgctcagcgcaacagtagctttattcgcggtgtctcccacgactggagacgtacagtcagggaaagcttgcgtgccatccccagacgtcactgcgacccaacttccaggcacgggcgaagcaaccaggacgttcgtgccaccgattcccactccagttgtactgttgaaagtcgcgctaggcacgagagagaatatcggcacattcaaacgaacctcaaggctcacatcgtcaatcgcccactggtcaaacaggttcctgtacttccagagctcccgctccttgacccccaactcaccgtgggcaccagttggatcattctctgctgcgataacttcatctcgtgtgagtcccgttgcaacatcaataggaaaactcgagtggttcttctgcatccagaagaattgcgcgttctggtgcattgaaagctgcggcaggatcaccgagtacgctgtaaagtcgcttgttcgagcggtagcgttggacgggagtggaatttcgagtatctcgttccaggtgctgatgttgttgagatcagcgccttgagggagatatccgaatctgacttcttcatcagcgtccgtcatctcgcaggcgatacggttgtcaccagttgagtcatactcttgaacttgctcgaatccgtacacgtggtagaagtgcatcttgccgtgaaatccttcgagctccagtggagcagtcagcgccaatcgctcacctagcgatgtgaagaacaaggaattagttccattgaacccaccacacgcgctgcttgaatacccatgctggtggttgctccagaaggaggaagccactggagttgccgttgtatcgtcgaaggagtcgctttggaggatgacgccaccccaaggctcatcatcgacgtcataagctgtaggaactgggagtaccgagacagactgcgaaaagagaactgcgctactcgagccatcaccttctattagagtagccacatagtcaatctccaagtttccggtggtttgtgctgtcgcgataatgccacttgcaaccgagatactggaagtaaacaccacagagctggggttaaagctcactccagagcaggtcggcgtcacccgcactgcctttgaatccgttccagtcaagtacagccgaagttcgagcccttggacagattcaagaacgccgaagtgtgcaggcagcggagtcgcaaatagctcgagagagtccaaagccgttgattgagcttgggaagtgtatatcaacaccccaaatgctgcagcaaagagcaggagggctctcatcgtggcaacgtcttgccacgctgctccttctagctgacccggacggagtacctggacgaagttgcctccaacactactgcttccttattgtcgtcaaatagcactgaagctcacggcctggtatttcagggcatcagccaccaacatcggggtcctgagtccgcctaaataaacacttgaaccgcaaaaaataactttgcccgtcttcacttcccattctggttcacatatttcctctaacttagtaggccgagtgcgtctctagcaatccttgagcagcttccgccagcgcattcgctttctcaatggcctgcgtcacagcagccagagtctggtcactagcacgagggcccgtcttcttggccccacacaaatactgcttcaccagctccaaatttccagcaatgcgctggccctcgtccaggaccctcgagagctcgaacaaactctcgtctctggacgtaaagttgcgcgccatttgccgctgcacgcgctgcagcgccgcctgggcgctggccagctcattgagcagctctctcaggtcctcctccttctcctgcatcacatgctgctgagcctgcagcagcgccatggccttgatcgccctcttggtccctgccagcgtctccagcaccgtctcatccgttggggtcttccccttgaccaccagcctcaaggcctggggcgagctcagccccagcaccgcactcaccttcttcttgacgtctagcacgctgccggagcgtgggaagatgacgtcgtagcggcttttgcccctgaacacctgcatcagtagcagaccgtcttccagctcgttcacatcgatctcgggggctctagagaccggtttggacccagaatttctgggttcaaggggtgactcgactgaggaagaggtcgcacccgattctacgcgcttcgaagcgctgggttgctcgtggaaggcgcgattgcgcagcagtagcagcttgcagccgtccgtgagcactgaggagctgctcacgtcgcgaccgcgaagcaccaagcgctggaacttgggctcgagctggaactggtcgcagatgcccgccttgaggtgctcgagagcctccgggtcttgcggggccacggccacggacgtcgagagcttgccgaacacgacggtcacttgcagctcgtccgccattttttggtcgcagatttttgtcctgccagaagtgattatttgcctgtaataaatgacttgttagtgcatagtttagaccaatccatctactgcactttgaagtacatgtacttgcgtatgtctgcatcaaactcttcaggtgcacatgtgctcggcagcctgaaatgagtatcgtggttagtgaaaggttactaccagcagtaagcgtatggttcgtgatgcattagcagatggcactttcaaagggtggattcgatagctgcatccccacagcacaattcctccgcgacactgtggttaatgattcaagggcgttgtattttttatttgtacctgaaaggaatataagtttaaagtaaaaaaggaactcagtgcttgttaccggtacagtacatgtaactgattgcgatcgaatcctgtgataccaattatcctgggaacgtgaatcgatcgtatgtttgcttcgtgaatctggggctgtcgtgcacgtgaacgaatagtacagattgtcaagaattcttttgcgatcgttttatccttaccagcgcgagtcgtaaacaatcccgtccgtagtgatacgtgtacatagtttcagggaaaatgaccaaatcggtatgaaatcaattttaaatgccaaatcggtatatttcgtgactgaatccgtatgcgttaattttaaatattgaggtgcgaactaccacgccacggacgccctcgcttcttgcagactccaagacaagtgtcataacattcatggcatggttgctgtacttgtggtatgagtactttcaggtaaggatatgatgaaaacaagcaagtagtccacaatagacaagctcacaactaggtgtttagttcgggcgaccacccgaccggtatgcgtgattggggggtcataccgcttcagcatttaaaatgcgatttcataccggtttagtcattttccccatagtttcaggaccactctatatcactatctaggggcatcaccacttcaacgtactatatcatttaggcacttggtgagcttgcattgcactcgatacgtagtcaaatgcaagttgactgttgtgctggagattatactatctacagctatcggcgcgaggggtgatgctgctttcagatggacttaaaactacaacgcggaatctagtttagcgtcccaaatgattagctaaatgcgttccagaataacctgatgctagatacttcctatagtgcgattcaggaaaagtcgagcgtatttgacgtcacaagcgacccgtgctggggttgaactttgccggacatgttttacgaaatggactttccttagagtttatgcccttttgatagtgatacatacaaaactggtgtttatcactcggtcgggtgttccagagattggcaggggtaggtgaactcggcctcgagttttcacttctgtattcttgctcattttggacataaccattgcaattcgcagagaacccgggaaccagcaaggggatcgagttcccgggttctcggcgaatcgtcatggttatgtccaaagtgagcaaaaataatacgatatcatttcgcatatcacttgccgtcccgaccgagaaccagcaccagccagcgcgaccagcctcttacctggtacatgtcagagtacccttttcattcgagtataggtaatgaacggctcgattcgagtgtggccttggccctctggggtacaggaacctccgatacaactttcttatccacctttttgaagacactgaggccctggtctaagtaaaactgtgctgagatttgtacaagggactgggttaggcgagcacgagtttgtagtcaaagtagacgagttccgaagttggttcccaacttagaacctggtcagcacgagttctgagaatttgtgcggtactatatctggcgtaagacatcgaagaagcgccgaagaaagcttggcttttgccgacctcattttacaactagccgtctcgagccctccctcccagccacccgaccatcatgtacgcgaacgacacctcgtacagctccgccgccgtgagcggtgctattgaagacttcatgcaacttccagcactacataaaccacaggtagccagaccacgtggtcgcgatacagtaattgctcctcaacagccctcgcagaggaaaagcaaagctgaacagatgatcatcgtgtctctgaaggttactgaatcagtatgaaaaaaacttagcagaattaaaaaccctcaaacatgtggaatatcctaggatacgctgtcctatcctatggcattgcccgcgcagctctgtgaacaaaccttgttgtcgttcggaagagtctctcattccacaatttgctcgacactccacaactaccaccaccccccaggaccatctatcgtctcatcaaccaacaagcatgcgcctcacctacatcctcgccgtcgtagttgccgctactctccacgcaagcggcaccgcgctcccgaccaccaaggattccaaccaggccgcgatctccaacgtggcgtcagctggcatcgtccccaccgaagagaacggcggtcggatgctggtcgaggaagttaaagaggaacgcgcaggcggagcccttgttaagtggttaaagcagcaaggggagaacctgaagttccacatcaagaaatacatgcctggaacacacgagaacaagctttacacggatgtccagcaaggaaagagaaacgccgagatgctgaaaaggcgagactcagggatccgcgctgcaatgggaaactgaggaagcgcatactgttcagtgaattcgacacatttccactcgcccgcctattttcgtttttagaggttgcttcgagccgcgtcccattttttcattcacacaggcctctgtctgcataacaagagaagacaagacagcagtccaactatgaagcgagtctcaacaccgctagcgctgtcgccgtgggagcagttggtggtggccaggttcgcgtacgcgctgttcgctgttctgtcggtgcatctcgttctgcttgcactgtgcttggcgattgttcggcgaggacagacgctgctgttcggtcagtgggaggagatctccggcgtaaagctggtggcgtgggctgcgctgctgttctattgtggtactagcggcctactagcactcgtgctgaagagtaagcgagcggcggccaagcacgcgctagggtgctggatgctgttattggtgctgcacacgtcgcaccttgtcgtcacggtgtcgcctgcagtgccccacgataactcgcactcgtggacgacatgccagatgatggtgcaagtgctgacggacgccatgagctgcagcttcctcgtctggctgctgcggcaacgaaatggcgtccacgacaaggaggatagtttgcgccagcctctgcttccagttgtaagcatggaagatgctcatgatggtgccgagtacagtagccgaaccacatagcgagctgacgttgaagccgtaaatcgcatcgcattcctcaaaagtcttcctttatgtcaatgaaataagcgtccgcaaggaacaggagcgcaacgttgccaacggtggtaagcgacacagcccaccactaacactatggcaacgcctccaacctcctccgacgttctactgcctctgtcgcccatggacgcggtgatgcacagcttcggcttcgtgatcctctacatcttcccaccaccggtagagcccccccacgacctcgacaagctgcagtcgtccttcctctctgctgtgaacgaagactacccgatcttcatcggagagctgtacctggaccccagtacgggggtcgtcaacgtgaagcagacggcggagtcccagcgaaagggggcgaaggggatccgcttcgagacgaattccagcagccccttgacgacggagcaggcgatgcagaagcgttcgtgggatttgatgccaacgacccgaggcaagacggagctcatgtgtgtgaagggctcgctgctggccgacggagggttggcgatcggggtggacgccagccacacgctggtggatggggagggcatgttcacctttatgacagtgtgggggcagcactatagtggcgtcaagaaggaggaccgactggttgtgtgccatgacaggcacttgcaacagggaacgggtacaccatcgaccatgcagcacccggagtttcgagtggttgaaactgcgtctggaggtgaagctgaagctgaagtcaacggtggagaagctccagctccgccgtccacagaccaccacttgtttcactttacgccccagatgatgaagaagatcaaggaagtcgcgacgcgcggtgggttgtctgttagtgaggatgcaggcgtgtcgtacgtgagtactacggactccatcacggcgctcttcactgtgttgatctcgcgagcgcgcggccacgggcacggcgtgaaaattacgactggcgtcaatgctcgacgtcgcatggagccgcctttaccagcaaattacgttgggaatgtcattttcaacgcgctatcgacctacaagaacggcgagttgcagcctgatgaagacgaagcggacgacgttgtctcgccagcaaagctggggaagatagcaaggcgcgtccgtgcatcgatcctcgagcgcaacggcgagtatctccgagatgccatcaactttctgaccgagcagcgcaacatttctgctgtgcaggttggcaccaacttctttttcggccaggacctcatgttcacgtcttgggtgcacatgggtatgtacaacgcggagtttggcggcactcggccgtggtatgcttgcgtccccaaactgccgtgctacgatgggttcgtcatgatcacggaggcccagaagggcggcgatggggttgacgtcggcgtgttcctcgagtgcacagcaatggagaagcttcagaaaatgtttcaagaggtgaagtacctccacgactgaagagtagaatgagtatcgatcgtcagacgctcaattctcacatttatttgctgacgctgcatgtatctatcttacgatctaataatcctcctgccgcgaggagatgcccacctcgcacacgtatttaggccgtctcgaatttacatacttcaaagtagcaaactttcattagagaagtcggtgtctctgggtaaatttggaagctcatttagagacaatacatttttgtatttcctacagccctgcagtgagcttatcctggtgatatgggccacttcaatcatatctaaccttgaagaaactctacgtcagcgcacaagcccatgaacttcttcatcgtggcagcttccaagcacacgagcacgtccagtccatcagcgcctctgacagcttctgtgatgagcacgaatccgtccatacattgcacgcgggggatcgacgcgtaccaaggtctcgttcctccaaactcggcatcgtacagccccatcttggcccagcacgtgaacgcgacgtccgggccgcagaagaagttgacgttgtcgttgacgctggacagaccggtcttctggttggagaggaacgcgatggcgtcccgcatgaactcgctgtctcgctccagaatcgacgagcggatgcaacgagcgacacgagacagcgttgacgccgacactccgctctgaacatcttccttatcgcctcgtagatcctcgctcgtatacggcgaaatcgcgtggaagaccgcattcccagcgtagttttcgggcaatgggggttccagtcgcttccgcccgttcactgccgtcgagactcggaagtctcgcccgtggccacgagctcttgtgatgaggatggtgaacagcgcggtgatggtgtcaagagtgctgatgtacgaaggcccggagccgtgggcgatcttcgggtgcttgtatccacactctgctgtgcgcttgagctttaccatcgtctctggcgatagatggaagacgtgctgggccgtgttgggtggcgtggcagcggctttaggagctagcgatccatcctctctgcgcactagaggctcggccggtacgatctggaactccgggtgaggaagacgagaagctttcccgtttcctgcgagcaggtgtcgctcatggttgatgaccagccgatcttggttgctgacaccgctgtagtgctgcccccacgccttcatgaacgtgagcgtggcctctccgtcgaacaggacgtggctgcagtccactccgatggccattcctccgtctgcgaggatcgaccccttcacagcgatgatctccccaccactgcgagtcttgggcatgaattcccacgagagagacgatatcgcgtcgtccgtagtcttggaactggtcgagttcgactcgaagcggattgcgctgccacctcgtcgtcgctgctcgggcgtctgctttacactgacggtcccagtcttttggtcaacgtcgagtgttccaacgagcacggggtagtcctcgtccactagcgagacgaacgagcgccggagcttgtcgaggtcgtagttggctgcatttgacggaggcggcgggtagatgtagagaatcaccacgcgatacgtgttcatgacggcgtccaacggcgacagcgggaggaatgcatcgccctcgatatccacgactggagtgacgacgttgaccatggctggagaagagagactggtgttggtgtgggtcccgcaattgatccgcaagagcgggaattgcaaagtgacctcctcgaaagacattgaagcccgcgttgtagaagctgcgacgcggtctcctcaaccgagccaagcagatgaaccctagctatagtgaaatgaaccagccaggcactgtaacacgtaagtactgtaggttcaacagtgacgtcttcgtggtgacttccacatcactacacagcattacaactgtagcatgatgagatcagcttactctcgtcattacgcttgaatccgagaatgaacccagtctctctctatccagaagatagagtgctttctgcaaagccgaatgtacaaagttagtgtcgattagcacagccgacaggttgctccgctcagtcagacagtgaaacggagctccgcaagtacgcgacgttgcgctcgaggaccgactgtacaggcgagaccacagcttattcgtcttcaccagcttgaaatgcatcgtttgaatagggtgacaaggcgttgacatggcattcccgacgtacgtgtccggcaaaggcggctccaatcgattgtagcctagtattattccctttgtaacctacacatcttgtccgtggtcacgcgctcgcgatttcaaccaagtggggagcgccgtaatgtcgtccgtagagccccaaccatagcgcagccactcgatcgcccttcttcacgacactgtacaactacccccacactgtcacgaaggtggccatggcctctttactccactttgcaactcactacgcgggttggcgcaacaaaatacggggttttccggcgagtgcagcgagaagcgagaacgacacgcgttgttgcccccccccccgcatgaatgcttggaagggcgagaggaacgtgtgtttttagtccactgtccactctttttgagccctacggttcgctacagcgtaccagaactctgttggtcaggctgataaatctttggagcgcgttgccatcgtccgtacgtttgaatcatacggtatgatggtttggattcaggtattgcgtgagatagtcattgcggagaagcaaggcctcactcggattaaatatttcaaccctttggccgatcaagagttcagataaaacctttgcctattgagaatccagatacctacttgtagcattgtagctaatgacacgtgcaggctctttcaaaacaggtgagcaagaacaacaaccaccggcgtgttggattaattctcatgattgcggtgtcctactgaatcaaggcaacggtttggattgcgatactcctagttcacacagccgccgttccttctaggctcaagtacacactccacttcgggggctttcaaggagacagtcagatacaaagatttaaagaccaaaaaccatgcggatatcttaggatgcgatcagcgtcgagtcgagatttcctgtaaggtacaccgtcaagggcatctcgttgcggttggctagaccacctcattccgcgattttctcggcagtctataaacactccactctccaagtcattcccccggccgtcgccacacgaagcaactggaacgcgcctcacctacatcatcgccgccgtaagtgccgccactctccatgtcagtggtgccgcgccccccaccatcaaggattcgaactccaacctggcgtcaactatcggcaccaccgaagagaacggcgaccggatgctgcgcaaagtgaaggagggccctgtgtccgaggaaaatgacgaggaacggacaggaggggcccttggcaagtggttcaggtagcaaggggagaacctgaagttccacctcaagaaatacaagcctggaacacacgagtacaaactttaccaggaggtcaagcaaggaaagagaaacaccgcgtgactgaagaggcacaactcggggctccaatacttcccggctagacgcaatgttccggttaaagctggagcatgtgcccccttcgttgtggatattgctcgaggatacgcacaaaaatgacactgaggagggccacaatgctgttcggggatatttgtacgagattcttaatgattgctggcgagtgggtgctattgaaaccctccaagcaatttggcgtcgggggtgtctttatcgagatgccaatgaggacacctcgccacatagggcagcggcggtcctacatgggcgactatctgaccgtgcgagcacattgcacgacgcatgctgctgggccccacagagttgctgctgcgaaactctgttacttcgcattgactacacccgggccagagacacaggggctgccgtcacctacgcggcagctgcaacaccacatcctctatttcgataggggggtcccgaggcaaccccggtcccggtcggccatagtccaggtcggtggggctgatctcagaccgaaaattgtctggcttgcgagcatctcctctgcatccaagaccaccaacaatattgctgaaaattgggggctactagtcgggctcagatatgcggtgcgcgctactctatacggcatccatgtcgtcggagacagtcatctcatcatcacgcagcatcgtgaacggcgatttccacgttcacgacatttacaagggttgtacactcaatgtcgtacaatggcagatcgtctgatggtgcgatcatagacacaccatcttcgccatttcaacaagatggctgacgcattggcaaacatggccacggattccaagacaagcaagcgtttgcagcggacgtacctgacttgccgccgaacgctgtgctggttacatgtagcaccagcatatgcacgacggttacagtgtgccctcttcagtggaggcccggcagtttgcctccgtatccggatgtgtgtctatccagtgatcaacatccgcttgtaggaatgtgaacaccgaggacgaaccgcggcgtgattcggggccgacccaagcccagatcgacgacagatctcgcagatctaggatggccgaggacagaaggtgatggatcggcggcgcacggcaaccggcacaagtcatcgatcgggagttgatcgccgattgccgatcgatcgtggatcgcggatcgggagccgatcgtggatcaccgatcggggatcgaccaggatgggatgcacatggaggacgaagtcggggcaagaatccagtaatcgtttggttgtaggatggtagcaaggaactgggcctgcctgagctggccatcgtctaccgagagcgcaaggaccgcgcccaagggttcgagcttcgtcgcagggacttgatcgaccagttcaggggcgtcaagggttactcggatcggatctggttcgagcccggactctgggctgtgcccaaggatccgtgccactggattctccgagaccgagatctcaagatctcgctggctgaccaacttttcaccctggacgactaagaactagttcacacgcaatgggccacccgccgctcagacaagcagttcgaagcgatcgtcccgcctgagctcaaacccaagagcagagccgaacaagaggcgaacccaattatcccagcaccggagtacaaccacgacacgcttgctgaggtgcttcgcgctctggaagccgtgcaagacgaggagactgaggaagcataggcaacgagcgttcatgattgtttctaattcaccactcgttttgatacttctcgtctccttcctcattgatctcaggtcctcggcgcgcggtcacctcgcgctcatccactgttctccacgataaactccaagtcattctccacatcacgtagggtagtcgtaaattcacataatacaaagggttcacacatagaacgtcgcagcgacatacacaggttcacagctgaggtgcctctactgagcatcgggctcaggaggctcatccccagcttgcattgcttggaatcgtgctttcgccttggcgctcttgttgaactcgtacagcaaagctccataacttagctgagacatgggaagccactcagtgtcagggtaccccttccacttgaccaagtactcccggactctccgtgaagtccgggtccgcttaacccagcgcacatcctgaatgacctccacttcgtacacattctgagcttcatcgggttcttcagcatcttcatacaacagagctgcgtccagatcatcatcctcagcaacttcaacctcaactgtaggtcgttcagggaacagggcacgcggcttgagtcgacttatgtggacgcaaggatacaacttgtacccagtcccttcgatcttcagcttgcatcggaagtcatctgaggtctccagaatccggaacagaccgtgccagaggtgagcgaacttcttcgtgaacccaggttgcactcgagctaggtatagccacacagcatcaccaactttgaaacccttcttgagtctctcagacagctcagcccagatttttgtctaagcagctgagcgttttaccttgggctcagcttgaaaatccttagcccaggcctaagcgtactcgtactcgcgctgagtcttgcgatgccactcataggcagtcctctgatccaaacccgtcggagatggtcccagcatggccgaaacagtgctgtgagggtcccagccatgaaccaggtagaacggcgtgtctagacgggtggcgtcgaaggacgtgttcagagcccacatcaacttctctaccaggtcgtctgatctggctcagcgacgtacgctcggatagctctgaccactgtttgcactgagcgctcttgctgacaatttgcctgaggtctatacgccagagtcgcacgctgccggctccccagcatctcgcggaacctggcgaacacctcactcatgaaacatggatcacggtcagggcggagcagagagctcgcaccaaacctctggaacacacactccatgtaggcctcagcgacatcttgggctgtggtcagactcatcggcttgcacatgatgaagcctgagaatgcacactggaataggaccaggaacacatttccacggtcggacttgggtagatgcgtaacgaaatccatagagaccacctcaaagggcttagtcgccaaaatgtttcccggcgacggcccagggttgggcggagctcccttggcagtgacacaatccacacactccttcacatagcgttccacctcggtgtacatcctcaactagtagtactacctgcgcagtcgttcgaaggtcctagtgatcccttgatgaccaccttggaactcctcatggctgaactgaagcaagtcatctctcagcgccgttggcacaaccaatctcagattcccagcttcgtccctgggcctccccggagtagcccgactcagatagtacaggactcctctcgaatcaagggtgaattggtccaccaccttgaccacatcttcagcctcagtagctgaaagattccccaagtctccgttcagataatccttgagcttcttcgtccagggctcagccccctgcagaactaggatgcgtctccatcgttcagcgattgacgcagcaggagttgccgcttcaggtgagtgcactggagcttgctcagcggggagctcaacattctggtcgggatcgacactttgatcggagtcgtccctggctgttgtggtttcagcgtccctgacccgagcttggttcctagtcaccacgaagatcatagcgctgggcagcaggggcttggcagcatcctccagcggagttggctcagccaccacttccacatcagcttgagtgtcaggctgctctgtctcaggttcagcaggctcaggttcattcaccttgatcagcttctccgggatccgattcagttgtttgagctgaaccagttcaaccggatcctcaatggtgacaggaccttgaatcaccagcgtcttcgacgtgaggtagtccgcaactgcgttatattctcgcttcacatgtaccaagcgcaatcgttggaactctgggcgaagcgtctcaaactcagccaacagcacttgcagccctgggctcaggcactggatcaagccctgagcttgctgaatgacaagccgagagtcaccgaccaccacgaggtcttagatgccacgagctttcgccatgcgaactccctcgaccagtccatggtactcggcttcgttcaccgtaatgccttcgaagtggatcctcgagcttcaaccacatcccaggacacagaatgcagccagaagcaccagagtgatccgagagtttggcagctccatcaaagctgagcagccatccctcgtagtccacctccagcatctccaagctgatcggtggggctcggacaactcgtcccttgtctgggatgaggttctctgcgatcttgtccaactgttcacggggggtgatcccagctcccatgatcgcggccaaaccatcttcatcgcgttcgaccttgtgaacttccaaaggccagggcgacagacgtgcagcccactgctcacagcgtccctctagagaccgatacttgaacaaccatttcagaaccgtgtagaccttcagcagcttgcaaccactcagcatcgagtagaagactctgagaactcggagcaacgctgcaacctccttatcagccgggtggtatctgagctcctgatcatgcagtgtatcgcaccgggaaaatgactccatcgtacgcttggcccagcaccgcacagactgcccagggattagcgtgtagaataatcacgaacggcttctccctgtccgggtgtctgagcagcggggtagagacaatcttctgcttcaggatttcaaacgcctccatagctcggccgagatcacgtccagcttggatctgctcatccgtcaactcgtagagcacagacgctacagccgggaggtcctcaataaacttgttgtagtagttaagactccccaggaatgactgcactcctttcaacgtcgacgggaacggcaagtccttgactcttcggcttagctcggatcccctcagctccaatctcatgcgagaggtaggagatagacttcttgccaaactcactcttgagcaagctcaccgaaattccccagtacctcagtcgataaagcaaccggtccaagacttcgcacatctggtcccaagtctctgctccatatgcgatttcattgatgtaggagcttcgtcccagaacaggactcagctgaggcggggccggaatgtttcgccggaacacggtagtctcctcagacagaggagggatttcttcctccttagcggagtcgttcacctcgatgcctaggaattccagcacgtccggaccaactcgggcctcctcgcagggcggaagtcgcacgaaaccccacagacaattatcgagcatctgctggtagatcagtggggcgttcttgtgaccaaacggcatgcgcttccactggaagtgtcccagcggacagatgaaggctgagatcagcatggctcggagtggcatcggcactgcccagaatccgctggccatgtccaagctcaggaaccacatcgctttctcaaacccgaccaacagatcgtcaatcaagggcagagggtagtgtgagagcttgatcagttagtcgatagtcgaagcacagcctgatgtccacacgttcttcttcatcccaatgacaattggcgaagcccaatctgaatgtgaatactcgatgagcccagtctccagcagcttcttgatcagagcaaataccttgtcgagcaagtgtgtcggaacttgccgattcctctgagctatgggcttcgcgtccccaatatccaagtcacagacaactccacgggcaggggctggtactgcattcccgtccccgagaaaactggcatgatgtctttccagaatcgaccgcacttgagcgtccatttctggagtcgtaacgcctggttctcccacgttagccgttgagaggtccgcatctggactgagatccttcaactccggaagagcggcgagctggtcccggaggtcattcagcaattcgtgccttcatggaagtacaccgtagcttcatcggcgtcctcactgatctcaactccgagacaacgagcatacgtttcctgaagacgagcaattggatcagacacgaagtcggtcggctcagccctgaacactcgctccagctcgttctgagcttcttgggcattcacaccacctccagcaggagaggttcgagctgggcttgactccgaggaacttggctcagtcgcagactgagtgtcagctctttccgatgtgcttccttgactcgtccctgactgcacatcatccgggtgaggcgatcgtggcagcggcggcttccatgaggcaggacgtcccagatgtgtccgggccatctacggtattggcggcatacgcctcagctctccgctgcttcatgttggctcggtcttccttcgggtcatcagactgtgacacgatgtgggaaaggatttttatccgcacccatgtctgaccgctgggatgggacgacccttcgcctgactgtgactggtcgcagtgaacaggaatccagtgacgtggagtgtgacatgtggatagtggatgcgcaaggtggatttggcgggacccggtgcttgcagtaagcatgggctcacaggatcggagatgtgcccaccggatgagcgctcatattcggtgtggagtaacacatcctgtccgtccgccgacttccctgaccgcaggataagcctaaggcgcgcaagtgcagccagtgaacgtatcctggctctgcctgcattggctccgtcaagacatcggacctacccccaagttcaccatgcccccatgcgcacaagacctcgctggacaaagtacactgtttaccggactggatcgtggtgcacccggtagcgacgcaccggatgctaaggtgccgtaccgaatgaggccggaccggatgatcaattcggtctgacccctggtgcccatactggatcgtgaccgcaccaacaacatgtccagtactgctgtgtgtgtagcagcaatccaggaccgaatcgaccaagaacgtcaagcgacacaaaatggctcacgtgattagacgcagaggtccagtgcggatttgatgagtcgctgtacccacgtacctctgtcgccagatgatgagtgttgccgaaggaacgttgacgtcgacaagttccccgataaccaagccaagtcaagcatacccaagctcagtgcaagaagatcgaagtcccgtgcacaatgccgaagcatatccaagacaagtcaagcatagtgaaacctttattagaagtcagtgaagtagagcagatagctagccaaacgtaagatcgaacagaaaccaatttgccgataacacgcgggcgtctttcttcgggctgggaattccccctgacattgacatcttcaagagcttatacgtgggatccgccttcgtgcgatcttaaaacggaggacgcttcaaggcctcactggtgttgcgagcactggtgtaatggggactcaaaggtaccaaggcaaagccggcagggactggggtgtatcgcccttgagtgatctgtgagagttttatttccaatttgcgtgctctatccgggcatccatttcatattccatcctgtgtgtcttaggcggtagaggtagtcaccccccagactgaattgattgactactgtgtgataggattgacttatattttgtattgttccctcactctgtgagggtggtgcgcgtaagtgagtgtgcatccagggttgaccagtgccttgggtgacggctcgtaagttgactggcgtatagaccccccacccaagggtcttaagaataagtggtggctgtatattttgtgacgtttagctcggcattgtatttctgtgtgttggttatattgaattgtggatctgactgtggtcccttcgattcggtctgaccttctgttcattcggtgtagtttgtttcaggaacacacccagcagactcgattctgtatttacaacaactcactcggtgaagtccggtccgccaaaggtaatcgatacctataggggttgacacaaggacacacgccaagtccaagcgatcctcccggcctctggttcacatcctgtgttccgaggactaccggattgcagcggatatctctggtactccgaaccgattcggtccggcatagtgcgctatacacctggacgatcaaggcgttcacccgcctcgcctcaactgcttcagcagcagcagcttcataggtcgcttgtagactggcctctccacagcgggtggggcgttgagctcagctagccgagccgcttcctcttcttgcctcagaaaatctggagagggctcggcttcgtagatgagttgagcccattcgctgtatttccacgagtaaggtcgcgcgaaccgcttcccgttgggcaggtaacccttctccacaaggcaagcaaccacagtgtgctggcggatcatgacttctcgctctgagatgttgaccactttgacagccttcggcctccgcccaggtccatagatgaactgtgtaacccactgatcaccgcacccggcccagggaatcaccttctctgggtcagtttggtgatatttgaccgggactatcacagattgtccagggtaaaggtaggcagtctcattcaaccagacgctgccttccagcccgacatggtcgatttcaggtcctccaaccaacaacagagattcttcgtccggcagcctcacaataccttgacgagcacagagccgtactccagctgccaccataaagtccattccgagaagacaatcaactccttcaccgatgttgccaacccagacatccataacgtacaccacgcgcactcccagcgtcagcttgatcttagcttgggcggtaatgtaggtcggagcatctcccatcccagttactctgagtctgaaaccacggcgtagcttgagcttcaatctgcgtgcaagatccaagcccaaaatgcttgtcgtagttccagtatccagtagtatctgcgttcggtgatgaaagattgctccgtgcaccatcgccatcttccgcatctcgccaggcagcgtgtgttcactccaccaaccatacttctcgcccggagtcagagcaaactcgagatggttctccatctcatcctccgggtccagcgtgttgaggtcaggatcgaaagtataaacaccagcttcatgataagaagttgcacattcggggttatctctgcgccaacatggaagggctgggcccacatatgcaaaggcacagagcgcttgggacttaggctcgtcacgcactggtctcccaaccagcgagcctagtggtttaacgacttctctcggagctccgggttatccaacagagcttggattacctcaggagcgaggccctcgaccgaacctccagtacggattgcctcgcgtaccgccttgagcgccgaccacatatcgcacaaaccacggcgatggtattcgccacacttggaacacgtctgacgcctacagaattgggtcgggtgaccctcatcgtggcatcgcccacagataagtcggctccagcacttgtcagtcgggtggttacgactgccacattcgtcacatttctgctctgggtgctggtctcctccacggtcatagcactgagcgttcggcttccaggccaatttctcagcgactcggaaaatttcttcattggtcagggaggtagagcgactgggctcagcctgagctgagcttgcagcagcaggagctggcgcggggacaggagaagacacggttcgctcagccgagcggtccacatcttctgcagaatcagcctcgtacttcaggtcgtagtcatcctggaagtgtgcatgtcgtcccagacttgggtcaacttccacaccttccgccttgaacgcacgtccctcagctcgaggctgtggaggtttgaaacgtccaaactgaagtccttgcgctgggcgccgcttctgctcatagctctcgtcttggcggagatcctcaatcctcttcagggttttctccaattcatccaaagtatcaaaacgctttcccgaagagtagtcctcagccttgagtcagtgaaaggcttgataaaacgtcggatatgagcctcgcgatcgacggtcggtccccgatacgggattccagccttcttggtgacatggttcagacggtagaagaacatccgaggtgtatcggagtccttcatctccatcgagtagtaccgctcggccttggagctcagcgtgcggcaccattccttcttgaagacgtgagacaacttcttccagtccgatcgaacgtcatccgttagctgagtgcgccaatccttgagggaaccagtgagtctcatgcgtaactggaccacccgggtcttctcgtcccagggggccatcgtagcgtagtgcatgaacctctcccaccagttgactcggtcctccagcggtcccttctggtcgaacttctccaaagcatcatggggaatcatcgcttgagcgaccacgcgggttccagaactggtatcagtccccttaggctgcgccacagcaccaaactgtccttcgagctcatcttgcgacgaatcacttgagcttgagtcgtccgagccagagtcgtccccgtccgagtctccgggcctgccaggcttggtcgcccgagccttgcccttcgcgccagacgtcgcgcttgatgcgcgagacttagacttggtctcagcacgcttggccgaaccttggatcttgccagcactgtggctcataccagtcacctcagacttgttttggttggcttggagcagctgctgcatcacgctcgtgagctaggcaaactgcgctaggaccggatcggtcggcgatcgagccgacacgacaggtgcagggaccgggggatccgctggcaatggcacacgtccagcagtcgaggagacggggccaggatatagaccgggctgctcctgggctgcaaggagctggcaagtcttctcctcctgctcctgcatgacccactggtgctctgcttctgcctgcgcatgcttctctttcagcctcagtagttcccgctcgtgctcagtcttgaactcgacagctcgttcttcctgtgccttccgctgttcaacttgcataacccttacctcagcctcttggagcgccttttggacttggagcagttgctgagctcaaacctcgtccgccttgggcttctcagcttcttcggcagcgcggcgctgggccagcttctccaaggcttcaagctgcttctgctgctccgtcttggcctgttgttgggcttcggacatccgaacgttggtcgcctgaagtttccggtactcctcctgcagccgggcttgctccgcctcagagctgcactcaatcgagcttcaagagctcggcgttggttctgctgtgcatcaaggcgtgcccaggctgtagcttcactctgctgaagggctcgccggtagtctcgctcgactgagggcaagtcatcagaagtcgtcgttccggaggagccgataactgatggatgcgtgaaccggaatcccgaggaccgcacttgtcgggtctcagcttgcttcggggctgaacgcttggactcaggactgcctggcagcggtatctgggctggatgctcaggtcaatatggcctctgctcagctctggccggtacgggaccagcctgagtaagctgaggtgtgactgagatcttcattcccgggaatgagctgcgggacatcgtcgtagctgagcctcgcatcaccgtcgccgtcgacatgggcatgtgcgtcccagtcccaaccatgtagtcagtcatagacatcagagaggaaccagaggaacttattccaaacaggtttcccccttcatccgtgaccatcaaagacatgtcggaaccagagcttgcaccaaccatgcttcgcactcggtcattacggaatccgagcgcagtctcagcaggagcttcgccagactcgtggtagctcgggatcgagccactaccagaagacctcgtcagcaatgcacgctttcgagaaggctcgccttcgacacttgaggtcggacttcgaggtctgagaccagtgagctgaaggcgcatcacgacttcgggccccaggaacagctgagtgtcctcatccatgatcgcgtctccatcctggtccagagggaatccaacttgagtctcggcagcttgagcggccatcagctgagagtctgaggtcggcctcaagtagtatggggttgacccgaccgcagccttccaggcactgggctcagctccgaggaatcgggcgatgcgctcgatctcaaaccggatctgcgagtccgggactccagcaacttcagacagcgtgtgccacactgggacttggttcaggaactcatagccagcttcatgcagcatcgtctgcaacaaagcgacgcatgcaatgggcggcatcagtctcagcgccacgcgtactgccttcattcaggtcagagacggcaggaatccgtcgacgttcagcatggaacacgttcagccatctcgcagcgggcgaccgagtcacagacaccaagtttctggccgtagctccagccactcggatgaaaccccagagatcgtagcctccatgacatggtgaataggccccatccaccaggtgcacgactccagcaggcacagacatccacatctcgaactgggttcggccgtacgcgagcatctaaacttccgacagctcagactgttgggccaaggctcggccgtcagcctcgactccttcggggactcctctcagcctctggtaggggcgtcggtccggctagagtgaacttgaccaggctccgccaccacttgacgctccgaagtatccagctcccggagtaaagctgaactggaccgggcccgtcccagtcccagcagcaccatgagctcgcagctgcatctcggcttccaagcacgctcagtgcaccaccctcggcttggccactgcggagatccgcagcagttggcttcgggttaacaccttgcggctgagaagttgcagtcgcagcctcagaagtcctgcgcggcgtcaacgctcgactcacagcaggctctcccaggcttggactttcaccaacacgagcacttggctgagtacccgctccaccaccttgttcatcctcattcttcttctcgggcgaacttggtggtggcacagcggtttccgtcgttagtggcacctccggctcagcgcttggcgtagtctcgcctgacgatgcagcttctccctcagcactgggtgtccgggctcccgcagtcgatcttctcgccctggacgtcccagtctccgtcggcaccacggctggcaatccagccactctcaaacttcgccgaagcgaagactcgctcttctcaactccagtcttggtttccttcgaatcagcagcagtcgacatgactgtagcttgtccgtccaaagtcttatccctgatccaggcacgcgcaccacgtgtgacgaatcgcccgtgctttttgaaggctcaggtagctagaccgctcgaccttggtcttcgctcagcccttgcaccacttggctcagccctgcttagcgctgcaatagttccgctcagccccttccacagagcgaacactcccactccgcttcgctaggcttagccgcttgaacgcttggctcagctccgcctcgggtcgggcgaggcgtgtgttcctcactctgcgatgcccttggcgcttcttttgatcacggctacgctgtgggcccagactcgcgtcggccacaccagctgctgtcgattttgaaggtctccggaggtttcccagacgaaactcgctccccacttgacgagtcccagtccgcacgtgtccacagcccgaaatgccccgggttttccttaaggaacacaacaccacacacaatagcctccacttcctctctttggttccggctcagaaccacaacaccccttctttcccggtcggcctgggtctgggccgagttcgcctttatttctctgagcctgggcgaggctcgtcctttcttctcttcgagtcaagcaacgacccggtctggagttagtgactcggtttgagcctaggccgaatccaaggcactcacacacaccctgggactactcgcgcaccaggtccacaatgaaccgatactaataatcacacaatgcaccggggcacgccaatgtccccaagcacacaatacaattaccctgcctaaatctcagaatgggtcaccttccacccgaaaatatgaaatacaccctaagatgtaacagtaatcctagaaatcaatcagaaagacgcgctgtccgtccgtcacaaaatcgtcacgcttattcactaagtacgattcctactaattccgattagctgccgagcgcagcgaaggcggctccgttgccgaaggcgaccccctcgtacgatattgcggggccgcaggacccgccccggtctctctatagtaactcaacattgagagtagtgcagcgagccgacgaggcgagcggaacgggtccgccactgccgtagcgaagcgtaggcatcctgtttcaatagcgcagcgagcatagcgagcgaagcgctaaccaaccaaaaattcaccgctgcgtagctgcggcgctcggttagtatgaaataaccgtactgccgtcgcaccgaagcactctgacaacgttgatatgttagcttgaatttgtgtgaatggtcgccaagacaccttctggccaaagacttctaccccttacgtccttcggggcaaaacgaactctgtttaaatgtttacacatgcacaaactaggactcactaagtgggggcgtaatatcccccggtcttggccaatgcggcggctccacgtcggcgggcgtcgtctttgagccgctggaggccgttgagatccgcttgaagtgtccgcgatcttgggcggtcgcacccaatgtaggctggctcatggctgattcaccggatgagtgtactcgccggtgccaccaacttcgccgtcagtaccactgtccggacttaagctcagcgactctccacccagcacttcaacaggactccgacaactccgctcagacccatgccactccgctcaggtccgcaacactctgctcggcttctcgagttgagcaaagacttcaaacatcgcattcgaggccgggctcggactccacgtcacttcgctcagaccttcgatccttgcccagcttgtcgacttgggtgaaagttacatgatcacagtaaaagacgggctcggcacgacctcgctcggacgcctgctcctcgactcatctcggcatcttggacgacggccccacaaccactggggaggttgagctcaaactccacccggatccgctcagctcctcgacctgagcggggactccggtcatcacactcgaggctcagctcaaactctgcgtaacttctcactgcttcctggactcagctcagacttgggatacccaacaccagacatctcaggtctcagacaaacttcactcaagcccagagtctgagcggagctccgcccagacctcgggctcagcttccttcatcgcacggctcgtgtccgacagttggtgatccaggtccatcgcggccatgacgcacttgaagtctgcttgattgatacgggtcagcatcctggattgatacgggtcagctggacctgggttcggaggcgaaatccaccgagccttttcacaccacgctgatcagttttctcgttgttccgcttttgtttcactccttgttgctttttcccaaagccgacatggtcattgccgcgctggctggtcgttgctggtttttcctgcagctcgcactcgaggaatccttcttgtaccgcagcggtcagagtaatcggctgcttgcgttggttgcaatcttcatttgcgtgttggccagtccattcacgaacacgttgatcgccgtcagttcatcaaggcccactactcgttgtagttcacgaaatttattcacgtagccgtggtacgctccagtctgcttcaattgcagcagctggttgcgcactttagcctggaaatttggctcgcgaaaccctcggatcatcgcaaccttcataacgctccacaacttgatcgtcgtatcatccgtcatgtagcgctcgtaccaaaccgcagcattcttccgaacgcactggttcaattctccaggaagccaatgatcatctcgatctaaacggtagcccttctgctggaagtaggactcgaattgaaagagaaacgagttgagcttgattccgtcaattaatccatcaaatgttggcggactgacgtccatcttgcgtaatggtggacgtccatctccacgtgtggacgcaaacgtccttcctgcctcggccggagtcatcatgttcacgtcagcgatcgccggagtctcagcccgctggacttgggcagatacggcttggggctgggtcgtaattggcgcagttgacgctgtagctggggcactctgttgggtaacctgagcttgggcccgagcttccgcagctatctgtagctatctatagccgttgctgcagccgcctgaatctggttcagcgtcgttgacgttgtgcagcgcttgcaccagattcgacagatgccctttaatctcggtcatttctgcaccgatactgctgttcaggttcgtcaattcagcggtgacttcaacccgtagactatcatgagctaccgcaaattcttgccttaaatccgtcaatccagtttccagctggtcgatccgttgagttgctgtagttcggctacggttcgtggcgccagaagcgctttcttcacgaggtccgtcctccaactccaagaggcgacgtgctggggctgtatcgaagcgcagcacgcgtcgagccgtgtttcgtgcctcggactcgcactgcaagcaacagtcgtagatgtcagttcgtttccgccacagagttgtgcggagcaaacttcttcatgcgatctccaagagcctcctcaagactagacgggagtcaattatcactctaacaagcgcttcacgaatccgaaggtctttagctacatgtgcatgagcttgagctatacaaggaggagtcggtgatgcagagtctaggccgatctaatgcggaggcagggagaacttgacgcatccgtgatgttgctcgagcgggatagatttatcatttgccacgggtaatatttatttccccgacatcctgggcagataaatcgattttgacagtattttatttgatctgacagagaagaacatttcctaggcattttatcgcaatcttcactggatgggtcgacatacgagcataatatcacaacccggccggatatatattgtcggaggtaagaatcagcttttttccctacgtcataaatctgattggtcaagatatttatttttcgtgtattaggaccgccattggcatgcctggatggactctggatatacaatccggagaacactcctgctgctcctgacaaggccgtgctctgcccaaacagctctggattttacgtcgctcttgggtatacaagttagtgtactgcggcatcttgtttctacgtgccaattgcagaaaggagtagagatatggtattggctgagggtaaccactattagttgaattaacagatttatacgaatagtggccgttcttgaattcactagaggtttgagctggtagtgcatttttgaagtacttcagttctgacatttttaagtgcaatttgaaataataggaccaaggagcaacatagtctctccctttagccacaagcgaaacgaccaattattcacagagctagaggtgttgattaccggacgcactgctgcggtactagggcttcacgtaggctagggtcggtaaatgactgtattttgtttttcagaaagcccgttgcacatacatagcttatttaactacctgacagtagccgaaaaaaactaaaatatcactcaaaccaacgcttactgattatcttacccaccatatcatcgtgcataagaaaacacaacctgctcaacatgaattcgagcagctggccaacgttaatggtgatcatgcagtaaggagatcgctaactgagtaagatggaatctgtgctttccttcctgcgatacgaacgcacgttgggggcaaaggtggtcgttcttgattaatgaggcgagcctcggtgagggtcatgtaatgagccgagatgaggcagcctagggagtggtgtggtgggtatcgaatcgaagcgcgggcgattggtcgagccgcagcgctggtgtcttggccgtcggaatgcctcttgtgtccgagcaggtgaaagcgcgactggccggccgagacgatcaagaacgactacctatctataactactctgtgcgatgtggcggagcaaaaccgctgggcctttagaaccgaaggttcctcgtacccccggatgaaaatcgcttatcggacagtctatcctaatcatagccatggggctctccagcatcagcaggtcgctgaacttgatgcagctgagcgcgaatcatgactgagctccagttgtggcaacgtggctttctcctcttgtgcaggaaaacttaatttccacctcgcttcgcttgatggaaataccgattctagccgaccgatcaagtgcacgaataaaggccgtttgatactgaataggaaagtacaaaaactaatttggttatacttcggtagtaagacccgtacgacccaagggcatcttctgagcctgcttcgcagccgcagcatctgcccagaatttgcaccgctgttagtaagaagaaactgatttacaacataacacacgggaagttggggattgtagcaagctagccgaccccgacgatcgtaaggatgtcgatctcgtctacgtagatgtagccgcgattcttgatgattcctgtcgagttgaacggagtaccgagctccatcaacttactggaacgcgttctcgagagacggcatcacctcacggctccggtgctagctgcctgcgcacgaggcctgagtcgcatgacctctgggtcttcactaatgataccggacataatggctcttgccacaggccatagctaatcatgtaggtgccagtggccgatactttcgtcttaatgcctaactaataagtcgtcaccgttgaagatgggatcccgtcggcatgttgttggagcgaaaacaaaatccgatggatgtcgcttgagttgcagataatctatcacaggtatatatacttgattaaagggtatgcaaaataataggtaatttgacttaaccctttcgcgttaatctcaaccggatgggtcaacatagcagcataaatttgattagatcgcaggctctccagtatagcaggtattttagctataaacaccagcagcgctcaaacccatatctagcaggtatttgtggtgagaataatggcacctcagtggccttcacccatggactctggataaaatacagagaacatggatcggttggtgccattgtcgcccatggacgctgtcttgctgagctatggcttcgctgtgatctacgtgttcccggcgcctgtggattgtactggggcttttaatctccagaagctggaggtctattttcaagagttggtaaatgaagactaccgatttctcgtcggaaacctgcatgcactggtcgtgtgagtgtgttgcagacccctgaagctcgacgacaatgcgcagcaggtctccgcttcgagcaccagccacagaactcactaacctcggacgaagtcatgcagtctcttgagtggagtttcatgtcttcgaagttggagaagagggagtcgattgcaatccgctgtacctctctggcggacggtggtgtgaccatcagaatcacgctggcatgtgaaccatactctgatagacggggaaggtctcttcaccttcatgagggcatggggatgacgctataattgagtaaccaggcaagacagacttgtgattaatcatgaccggcgtttactctccggaacggggcgaggatcgcaacgaccacatcgagctacaaagtgtaggaccccattcttcagatgacgaggtttggtatctgaagacccagctgatagctaagtgacaataatgatcctcaattcaaaaacaaacgaccacatcgagcagtaaagatcgtgtcttctccaagtggagagatgatctcaatctcccaactaccagccaccacacagcacgccttccacatctccagacagaacagggtcaagctcaaggcacttgtagatactaaagctccaaaatccagaacagactcacctttcgtcagcacaatcgatatcattacggcgctcttcgtcgtgctgatttcacgagcttgaggccacggccaagccgttcgcatcacgacgggtgtgaatgctcgaaggcgactcgacccaccgttgcccatgaactacgcaggcaactgcgtcttcagcgccttgtcgacctacagcaaagaggaactgcagcgtgagacagaaggcgaagacgctgagatcaatcccgtcactctgatccaactcgctcgtcaaattcgtgcgtccattttggagctcgacaacgagcttttgcgcgacgctattgagtttattgctgaataggagcacctctcacgcgtcgtggttagcaccaagtacatcctcggccctgagctcatgtcacgtcgtgggccaacttggggctgtacgacgcccagttcaacggcactcgtccgtgctacgctgggatcgccaaggtcccattcctggacggtatggtggtcattgcggaagctgccggaggagctgacggactggatgtactggtgtttctcgagcgtgcggacatggagaggctcaaggagctgtaaggaggccggcgtcgcgacggtgaatgagacgacgggcgccgtcgagacgccaactgatggtgttgtagttcgtggcggagtggaacgcgtatccagcggaccgcatgggcggcaggatcggtggcactggaccccgactcccttcgaacccgtgagccctgctcactcaagaattggaggtctttggcgcaagcagccagaggactcacgaatcgggcggctaacgaacagccggacgactcagacaacgcgtgctcgggagcgggcacaacgaacgaacgaacgaacgaacggcaagcggggcgtggcgcagagtcacgagagacctcggtggacgactacacgcggtggacgacggcgaaggcgacggatagggagcatacggcttccgagtctctcgacggctgcgacgagtagggtaggtgcgagtgggcgtacacccgagggctagagacggcgtgacaaacggagcccaagtcgtgcacagcgagaagacgtgtattgtagctagacggtagcagataccgcgactagtttgcctaaataaaataggtgtcgctgtcagtcggacacgcaccggcgcagtgtcaggcgttttgacactgtcgaccagacggacttcagaccgcatcagcatggtcacgaccaaccccgagcgtgtggagctaaacacgttgcatggtggtcatacaggggcctagtcatcgacgtagacgcagcccacgactcacgagaacgccggaggacgctgccatggcgagggccaagttcgtgcaagtcgtcgtgcagtcggcgaagcgtgtgacccggaatcagccggcgggccagacccagacgacggttccggcgccagctgtagagtccaatccaggaaggcctgagaacgaagccgaggacgaagaaacggaggagagcgagccagtgcgtgaagcctccccgagcgacgggcacgacgaacgcggcggcgacgacgccccgagtgagacgcaggaacccgtcagtaccagcgcggaccgcgcagcaatggttccgctgacggctctgacggccgcgttgcagcagatggtgacgatggtgaccagaatggacgctcggctggaccagctgagcacgacggtgacgacccgggcgcccacggactccgacacgcagcgcagcagccgccagcgcctgtgacgaacccgtcagcttcaacgagtacatcgcaggcaccagcagcaccgcagcaagatcagccagctgccacgcgccggcaggtggtgttccagtcgaccgatgatggtgacgacggcggtgacagcagcgacgatgatgactcgtcgagttccagcagcgacgatgactccgacggtaacgacggtggtgggcgacgcggacgacgacaactcatgacgcgcccaggcgacggtgacttccatcgcaacagacgccgaaccatacgcgactgggacctgccgacgttcctgcctacaccgcagacgtccgtgaccacgtggattgcacgcgtggacttggcgctggagggagcaaggctatctggacgaggcggctggacggaccaggagctctactacattctgggaaacaagctgcaggacaacgcggcccgctggtgggtccagatggatacgacggacttcccagctgtcgtcgacgatggtgatacggcgtgcatgacggacacgtcgacggtgccggcgacggtggccaccgacaagggcaaggttgtcgaatgatgggagcgtggcagcagtgagaagagctgtcgctgctcaattgaatgatgagctcgcgggtcgtgagagtggacgggcggagcgatacgttagcacggtgaggccggccatggccaccctgcgctacgtgcagatgacggtggtgacgaccaagtcagcggcgccgtgacggaccactcgacggtggatatgacgatggtgacgaagagggcgacgacagagatgaccacggctgacgagagcccggtgacggcaccgagcccagcacctgcgcacaccgacgaggtgccaatctctgaggaaggcggcgagcccacggatgaagtgggactggctgaggaaggcggcacggcagccacgtgacgacggagatgacgagtatggagacctcgccgctcgagctcggcatggagctcacggacgaggcgatggtgaagctgggcaacgtggcgaaggtgcgcaaggccgtgaagcggtccaagcgcgcagcgaaacagctgcgggtgcagcgggcgcatgagaagaccaaggacaagcgtgacgatgacgaagttgcgcgggtagtggcggaacttgaggccgagcgagtattacggcgacggcggcaagccgacgaagtgcgtgacgcgctggaagcacgacgacagcagcgtgctgccggtgacgaaatgcgagttgacgaacgagcccgcgtgaacctggtgtggcacgacagcgccactgtggacgaggaggcagatggcggcggcgatgcggacgtgacagccggtgacgggctgcccacggccgagatgatcgtcgacggcacgacgcagcagtagaagattgacagcggggcgcgctattcggtggcaggcaccgactggatggctcgtggcgaccggaagcgagttgacgctcccgtggcgtatgttgaagggattggcggcttcttgttggcgtgcccggtgtgtggacgtttgagatggcgaacgtgtacggccagaaggtgacgatcgaggcatgcatcatcgagggatttacgagtgtgttcctcgtaggtgctgatttcctaggtggacgtggggcgactatggactttgatcgtggtgaggtacggtacgctgagcgtggccgtgacgtgattattccgttccgaacgacggaagcggaggatgactcagcagtggcggccgtgaggtcggtcagtgccacgaacgtgcagagacgcgccgtccagacggtggaagtggcgattgcagcgccggatgacgaagaaggcgtgtttctacctactgtgaacaatggagtggtgctgttagcggcggcggtgaccaaggtggagaagggcaaggctctggtccccgtgatcaacccgtacggcggtcgcatcaagctacctagcaggaaggagttaggtgtgtggatacctattgatcaagacattgagctcttgacgatgcatggtgagctacaacctgagcgggtgcaggcgtggttgaacgagttgggcgacacgaacacgccgtcggacgacgaacatgatgtggacatcggtgctgaggaaccagatgcccgtacccttatcctacgactactacgagcctatcgcgacctagccaacgcataggacgagtgtctacctgctacgacactcaatgttgagcataacattgacactggggatgctgctctcattatgatgagacgaagacgacaggcgcagacggaggacgccatggttgacaataacgtggacgctatgctatcagctggggtgattgagcacgctggggcttccccgtcgtcctcgttcgcaagaaagtcgggtctgtacggttttgtgtaacagggttacacgcacaagtggcaacagtcacttgtaactctaacagatacgacgtctgttagaggttcgaaagactttctcgaccttggtatagacacaccaaaggctacatacatttacgaccaccacgactagagacttaggattcctattggctgagagtagcatcttttagtcaatgagcgacatgcatagcattggaattctgccaatcagccgttggcagattcctatcttagaatattacatttagaggaagtcagaaacataaaaaacaaaaatagcagttctcattttaacccaaaaacattatttggatcgtttctttagattaatctatacttggaggcccgagtataattaactctaatttaaactaagctacgcttcctcacatacccgcgcacacgtgtaagctcccgatcaaggtgtgacgaactgaacttgagttctaactttgctaagggtaaatcaatatctacatgtacacatatagataccataaagtcgctactcatgaagcccataatgcgtggcaacggcatcgctacatttatcaaatacccaagtaaaacgttgcagtaggatcatgtattaacgtaagcttcaaaagccacgaaataatctgtaatcagtcggtattttcgtaaaagaaataccatactagtggcagcggatgtgtggtgaagatacagtgtagccaccgtttaagcatagctcagtttatcgaagcacggatgttagcggcctggtttctcttaaaccgcccgttgaaatccgcattcctgaaattgcggtgaagttcgttctcgtacgtgcgaggaatacgcttcttagctgacaccttcaagtactcgagcttgtgcttcagccatttggtaaaggctcctcctgctcgctcttcattgtcttcctcgaacgcagggtcttccttcgctttgcgcagcatccggccgccatttccttcgatggcatcaatagagtgaacgatgtcagccgacgccacgttggagatcgcggcgtggtttaaggtcctggtggtgatgagcgcagttccactggcttggagagtagcggcaatgacgacggcaaagatgtaggtgagacgcattcttgttgaaacttatgaagggcttgtaggttgccaggtaaattgtagaatgatgtggtctagctcgaggtttgttcgcgtcgatacagcaaaggattgcttacggcagcgtttcccaggatatccacatgcttactatttaataattgttgcactagtattcctagatttattaatacagtgacacctccctaaatgaacccctctaactgaccatgtgttccctatctggttaggattcctcgactgcaaacgggattatatcgatttcactataggtgttctataactgatcaaaaacctctttattctctaaatggtcgccattgttggcgcctcaaccccctaaatggacgcagtagtaatagatccaaactcatatatttttctcaataacttgcctgcctcctcccacgtatgccattgctattgtgcctttctcccaaaacgccctccgatttgaggtcctacgtaggagtcttgctcctacgtaagacctcataaaagttagaaccaaggccagtaaaaccgtgcataaacaataactgaatgtaaactgagcgaattgcttgcgaagggaggccaacaaatgagcgtgtgcagtaccgttatacctgtaggctacaggctgtagcacacgtacccgtacgtagctccacgctggcatggtgacctagctgcggtgctgcctgagtctccgcctgtacgagtgtggccaaactatgcatttgccacagatgctgtcagacacactgacgtgatctagtcctacgaagggctcgttagtcctacgaaggcccgaatggacagcttaacatggccattcggtccttatttccaaaaaggtaccctttagatgaagacggagctcctacgtaggacttccgtaatccgatgcagggctaacagcaaatcctaggtttaaccctaccctcttcaggagaatgtagggttagcagaggctctccttcttaagaccacctttttgaggtcatattgaccaaagtttctgaaaggcacaataccactactcccgccacaacaaatcgagcgaagagagatattttatttgggatgctaagttggaacaaagagtttgcagtaactgcaagcttgtgataaataagctagccacagtattttacaatcaggcgcagcctacatacaaattttacgaaaaataaaatattatgatgtcgagacaactaggggctatgcagtacataccaagcaaaagatgcaggcatggtggcaggatatcgggacaacaaatattcctataacctccctgcattgaaactcacgtacaacctgagggggtgcgattctgctaataccaatgagaagaaggagtaggaacagacaatactgcgcctaccgttattgggtgagttctgtttgtgtgaagacgaaacaaaacaagagtacggaaatgctggaggggtaacaggtaaagaaagcccttgtgcacctaacaattgaaaatgtagacattagaagtgtagtcatttctttatctgatcaattctttaactgaaacagcgtattagaccgagcgaactgggtgtcatttatagaggtgtgactgtatgcgtggctctgttcttgggaaagccggtgaactgctgtacacgacgagcattaatccattggatacgcgcgacccgcgtacatgaacttctcgggaaacgaattcttacttgatcattttctatagctattggttattatttttcctactgtttcaacctgggagatgcaggtcattccagagcaaaacctcgatccaaacgagagcgtggttccacacacactgtagctagcagcatccgatgctttgcgtcttggtgatttgcattctgacccataacgtcaaagcatcagccaaagtcacgtcgtaacatttgaagcactaggaatgcagacgacactgtcaacaagatgttaacttgcatgcaactacaacaaattgctcgcacactcggtctgccaactactgcgtagcattcacaaccgtggatgctgcaagccctaaattgacctgaaaatggtgcgaatggtgtggagtccctgtccattgtgtcaccgccggaagcagactacatcttgaaaacatggctacattttacgtcgcagtgaataccttcgcgttgcacccattctattcacttcagtactttgtcagttaattaaagcatggcttcttctccttcactgtcgctgctcttgtccttatcattctcttcttcttcctcttctcttggccgcttcttcatggccttgagtttctccttctccctcaggtcggccatgagcccctgcacctggtggctcttgcccagcgcctccgccctctccacgaagtcctcgaagttcagacccgggtacaggtcgaaggcccactgcttgtacatcttgacgagcgacgccagcgcctgcgcctcgcggcccgacacgtcggcgctcacttggtagggaaacgttcggtgcaccttcttgagaccttcggccgacaccaagtgcgactcgcgcaataggttgcgccgccgcttcgcgggtacactggcagccgccgctgtacccaagtcatcgcccacgtcttggctacctgctgctgcattcgctgccctggtggcaggcgcagcgtcctcccgccgggccaagtcttcgtcacgctcccatccacgtgcagccattgcgtcgagtatgaaaatggcagccatttcgcaccaaatgaacgagtttgacagggttagtgtggtgcacgtagatgtggtgtggatgacacagtgtatccatttttaatcgctgcttgaagtgactggtgtacccattacgtgtggcacttcgtggaaaagctgcaaacgtgcactttgtgggtctacggaaagaaggttcagttgttgccgttatcgctttcccttttactgttcgtatggatatcgggaaatcaacccagctccatggctgcgtgtcttcatcctctctccgtccttgatcgccactttccatttccattcctccaagacactcactcacgcactcactcaagctccccaatccatcgacaagcatgaagacttccgctctctacctgtccacgatccttgcaacgctggacgcgacgcttgtccgcgctgccgagtgcacgacggacgaactgaccaccatctcgagcatctacagctcggcgatgacggaggatccggcttcctgccccgacctcacgacgaccacggacatcacggcctccgactactgcaccaactcggactgtctgcagttcatgaccgacatgctcgacgggttcccggactgctcgagcggcggcatcaacctgaagcaaggccttcaatcggctgtcgactactgcacgagcgggacgaccgacacgtccgggatcttcacggacacgtcaggcagctcggcctttgctacggactcgtcggcagcgctcgcgacggattcgacgtcgagttcggcgcttccgactgaatcgtcgtcttcctcctcctcttcgttgagaacggctgctccctcgacaagcacgacgacgggctcgaccacgagcgacaagctcactgggaacacggttcctcctgctacggggtcgtcggcagcatcgacgattggagtggcgatccccgctgctgtggtggcgtttgtccttgctgctgctctttaactccaccggcccgtgttggggcgttcatgttgatccgactaagttgcataacaatacgatctcttttatttcccaaagcgtgtttgtgctcactactccgtagctactagcgtaactactagcagcaacaaccaaacgctaactaagttgtgccttgtacctgtcgagttgacactggcgtctggtgcttgtgttctcaaactgtccgtcgagctgtcatccccattcccagtcaagcacgagctctgctgtagacccaactcctccctgtagttgacaccttcgtactggcagtatggcatctgccggactacactcgcaagagtcgagaggcacgcagtcgcactgcacggcacagcgatgtaccattctgtcgacgtggacatcacgtacaagctacactccgagctcgtcacgattgaattcgtgagatatgccagactagagacttcggagttggaacactcgtcagaagatctcgaagataaagaatcgtctccggtgcacgatgcaagcgacttcatgacgtcttgtttcaagttcaccccgcttgaatagcagtccggaagctgctctacaagcgtccccatgacggataagcactgagtagttgaacaaggcgcgttgatgtagacctccatgctcgattcgtccatgctggagtatggaccgcaagccgacgaacctgctgcctcccagtacagctgagctgtggtgctcgcttccacacgcgtacactcatccaccgaaatgctcgctccgttcgtcgacgtgtctacagcgtccaccctcaccgaggaactcgagtctgcgctgcatttgtccagatgattctgcagctccgacttcttgttgacactggtgtctccgttgtcgttggcggtgagcgtgcggttcgggagcttcggcaccaaatctcccagcacagccacgcagcttgtagcagcgcacagcactttcaacgacgaatcctcattcacgtagtctgcacactcgctgctcgacagcacgccgtcaattacttggatcgtcgtgtggatctcaaacacggagcaagtgtcgctagctgccagaactgagccaaaactgacagcaacagcagcagcagcagcaacaactaaccaagaggacagccgcatttaggtgccaccttggacgagggaattgcgttgtgcgagcggccccatgcatggaaggtcgggtctcctgtgttcagagtgtacctacaacgcgttgtcttcttcaactaccaatttaaccccggtactgccgtaaccttgctgaggaagcactcagcaaggttacggcagtaccctccagaagcacgacgtatatttgtacactacatatgcagggttgccaagatgagtgcaatgctgtagatgaacgcagttgtcgtgctttttagagcagcactgtcggtttgtgaagctgcgctggagtcttggtcgttgtcgctggaagtgacggtggagtcaaagctggggttgcaggcgacggaggagttcaacgtggcgttgaggactatttccgagtagtggaagctgagggagatgttgtcagggttcacgatccactcgcattggtaccagtgatcgctcaggtattctcggtggttgacgtggtcgaagtagcacttggggacgtcgaagccgagtctgcggaccaatctgccacactccgtatcgcagtcggtgttcacgtggacgtcgtacgcgcagatggacgagtcgtattggcacgactcgttcgttgccacggccaggaagaagtcgacggtctcgttgttctcgtcggtggtgcagttcggcaccacgggtgctagaccagcagaagaccccaacaaactatcgaccgagtcgacgtatacgctgatgttcgtggcgtcgtccagcatctcgcagtagctgaactgcgtggcaatgtcctgcttcttgttggtgttctcccccgacagctcgtagttgcagttcggcagtgtttgggcgaaggattgaaccgccgcagcgcacgtcgagttgcactgcgtgtcgatgatgatgctgtaggcctcgatcgtcgtggagctcgcacacgagccatttgccgcctcgtagaaggcgttgaacatggcttcggcctcgtcactggtgcagtttgtcgacgacgctgtcgacgcgggagttggggctggcgtggcgcaaatgtcgagcgactgcaggagctggtccttctcggagtacgtggccgtggtgcagtttgagatggactcggccaactgcttcatgacggagacgcaggcagtggaggagcacggcggcatgatggtgaccaacaggttgctcacggacgcgtactccgagcaatcgctggtgctagctgcggcggtgtacgcgtcggtgatcacttggtcctcagcgtcggtgcagtcggctgcgctggtctcgcctacgatgtaaagcagcaacaggagcgataccaagagggaggatacgtggggatgcaaggctgggcgagtggttcgtcgaagtgcggcgctttcacgaatgaaagttggttgatgagcttcaatcgcgcttcaattaatcaatggctgcatttgtcaggcgagtgggacccaatcgaagtgaatcatcgtttgggtcatggacgtgaagcactattgcctgcagcggtaggcgtccgaggtgccttgaatcaatcttcattgccgcttgcaaggtttgcgtcaagccgccactaaggacagcgatgcagcatcctagcgagatggagccgacggtgatcgccacgatcgggtcaagcgtatgcacttcggagtgggacgacctggatgatttaccaccttgaagtggcgactagcgactcgctagtgactcgctagtagcgagtcgcgaacttcgcgttcaaggaggccatcaagcgactaaactgactgtgcattgactggatcgtgagttttggtctcatacatgctgctgcctaccaggctgcatcggccagctacagcataagaccgaaaaaaactcccgcacttacccagaccagtgtcaccacgctggtactcgctgcgctgttgttgtacacgaaccttccgtaggtctcatcagctccggcgtcgctcccggaagcctccgggctggagaggttgtggtcggcgtagatgctgacccagacgggcggcggcgggatccacagctcgcactgcgcgagactgttggccacctcctccttcatgttgccgctgtcgtagcccgcgacgtagtagtagcagtcgagcagctcgtctccgacctcttgaatcttcgtagcgcacgccgagccgcaggcagggtagaccatgatcctgttgttcgaaatggacgcgtcgccggcgcactcgtcgatagtcgtgaggtttagaaagagacccacggtctcgttccgctcctgactcgtgcagttgacgctggacgacgatatgctcgaagccgacggcgacgatgcagaaccggtcgatatcgagtctccattggtgcagattagctgcaccagcagcgtgagcgcgaacacctcgaaggaagtcatgcaaacacgttcaaagcgaacagtggtttgataactgagcgggtgtgtaaagcgttggtgctcttcgtcatagacaccgcgcgtgatgaatccatcaaagaggtgatgtcctccttcgtcaccttccgacgaccgtcgcgcgacaaggtggctcgagcagcgagacgttgaagcgcgcatcgcagtgatcaatacgccaacttgtttccttactaaggaatcattagcctacaccaaaacccctacgctggcaacaagtcccatagcaactgcaacaccaacatgtcgactcgacattgtcgaggtccagtcgaagctcctgagctggtagtgcgccttccaaaaccctcaccaaaaggtcgcgcataaaagtttaatcccggagaattgtttgatgagaccactttttggtctcatcaaacaattctaatgcgactcttaactagcaacgtgattaaacaagtgactgaactccactatactcgaaggtcgcgttccagcaaccgttttggggcgcattaagcgcttcggtaatttaaaataaattacggattaaactgatcaatcggttttatatgggttttggaaggctataccacatggcggtatacggtcgtcctgatgtagatggtgtggctcgtccccgtgcagtcgtcgatctcctgcagcagcgaggccttcttgttcgaagactcgtagtcgtagtagcaatcgggcagatcagctgcgaggatcttgagcttggacgcgcaggacgactcgcacttggtgaagacgtacacactgtacgaactgacggtggcatcgggcgcgcgcgaagaactcttggccgcctcattgtacagattcacgatactcgcaacctgcgcggttgtacagctggtactggagcttgtagccgctggtgaaagggtcgctgagctaccagacgatagcgacgagcccagacccgagccaaaagaccctgccgtggatgtggacgttgtctcggccgatccactcgccgaaccacctggccgaggggccaacaacaacagtggagcgctggtcttgaacggagcaatcgtcgttattggagcagtggtgatcagaggcgccgcagtcgggggactcacgaaaggcgcgtccgtcgcaatgaggtcttccccgttgcaaaccgtcatcgcgttctgcacctcaaccttgttgttcactccgctgacggagcagtccgggagctgctctccgacttgttccatgacggcgacacaggatgtggcagtgcatggtgcgctgacaaagtcgtccccgacggcgtactgaccacacgccgacgtcgtagcggcccactgccgcgagtcgctttgtcggaccggccgccgctgtattggagtagtaagtgctgcctgtgcttataggtttatggggcacaaatagcaaggagatcactaagcaaaatgcaataagtgttccttacgacctgtgtggtctttttaagcaaaattcacgactgaccttccttctactcctaactcttcctctctacctgcagatccttgcgtttcagtgccttcgggtgactccgttcccgctcacccctcccaaaaacttgatccgttcaccttgacggccctcaaagccgcccaacatgccatccgtccccgaagtcccgccacaacactgcgaggcacatcatccctccacgatacctctgggtagcggcccacgggtctccaccttcgagacaacccggcccacgacccactacttctcgcccgcggtcacagcaggtggatgacctcaggcactcgtcgtcgcccacgcagagttggaacggtccgagccgttccgactcgggacatcctccccgactgcatctcggcatcctcgccgagcgcacgaagcttgatccacttctctccttacttgccaggccctccgttcggcctgcaatccacttcgcgtccgcacctgcactctcggcgcattgcccccaccgtccatcctccaaaatgcctcacttagacgctcagcctgctcctgctcctcgagagccgcgcaccacgcagcgtagccctccgtggccatagtcagcggcgaacgctcgcccgccgacgcctcgtacaacctccacaacttactggttatgcataccagcgcaacccaaacattcaccaccagcaaccagtagttagtcactattgcatgctcgccctcctcggaggcgaaccagcaatcaaagaccacgactacagcgaacacgccggccacgccctggcagatccattcgacgacttcgtaggtgaacagcacggcgtagaacgccgagaacaggatccgggacgtcagcgtccataccaccttggcgacaagcttggcacgggcgaccgaacggccagacaccagactcgcccccgtgcagtacttggagcacgccttccgtcccgacgcccaagtctcaggcaagaagacgcaccaccactcgtggagggcgtcaagccacttgtagaccaacctccacagcccgtcttcatgctcgcccttggactccagcacaaccaacggggtggccagcagggcctcgtaacacttccacacgcgagttcggagcggctgcatttgcacggcaggcccacggacatagcgcgagttttgggcgcgcctccggacccgtctctccgttaacaatgcgtcccaggggctagacgtcctggacgccatggccatggacgtcctgtcgggtggcgacgcacaccgcctgaaccagatcctcgtgatcctgccgcaccccgaccagatgcaggccggcgctgccgagcactccgtcctgtcgatcccgctgccgccgttggtgcccacgccagagtcgacgtcaccgccaccgcgtccatcgacagggaccagatcgtcgccacggacgtcttccaagacgagaccgccatcgaagaagaaacagaaggccgcggccaagaagaaggccgaggcctacgacttccggttgccgacgacggcgcccgcgcgactgaagatcgacctggccgcacttgcgcagcacgccttcagcaagggcctcgctcggttccgcttggcgtacccctgtcgcaaacagcggtgctggtacccgccatccgagtatcccgagttgcacctcgtccactaccgtgccaacatgcgcttccgcgagctgtttttcctgtgggcgctgtacgcgccttgtctgaatgccgaccagcggcgcaaggagaaaatgaatgcgtgccgagcgcggaacgagctcattagctacaacatcgaggagcgagtgtacttcggctttctcgacgacttcgagaacggtgctcatgacacgctcatgtggttgggaggcagagcggccaagcactctgccggcgcgtctaagagcaagggcgcggcgcacgaggacctcggcgttgtcttcgcaaaggacaagattcactacgagcgggtcatcgagcgagctctcgaccccaagatcgtcgacgaacacggctacgcctcgattccggagctcctcgaggaggcggagctcatcgaccccacgcgagcgccacacctgcgactctccgacaaggccgtcgctcgcatcaagctcgacgtcaccagcgggccaccccccgtgccttcttgggtgggcaaccgaacccgcggcccgtggaaggcccccttgtcggacgcgtcgctcaaagacaccatcgaggaggtggtcgagctcctggacttgggcatgaaggtggccgtgtacgaccagaagcccttcaaccccgagagcagggcgacgatgactcggacttcgaggacgaggacggagccttcacggcgttgcctccgacgccccccgtgcagtaccgggctcccgccgtcaaacagcgagctaccactccgtccaagccaggaggtccggtttctcgctccagcaagtcaggcgagtccgaagactccagtgacgacaagaagaagccggcggccaaggacgacagcgacaaggacgacaaggcccaacccaagaccaccaaggcccccgtcgcggccaaagatacgctgccgggcgacgaagcagacgacgacggcgaggtagcgagcaagcctccgaccaagaagatcaagtcgcgttccgcaagcgtcgacaaggccaagtgagtcatgcgcacacctcggatctccgtttatcttcttcatttcgttgtagtcgagtctagtgcagccgcagcactaattttgcaggtaaaaccaaataaaaacatgaacttgacatgcatatccaccattcttgagctgctcgtaaatccatatccacaatcacaggttcttcagctcaagaacatcaccaactacgccagcagcaaatagtcatcatcgacttgggcgttagcgtccgccaaacgcgcacttcgacgaagctccggcaacctcttcttcctcctatccgcttgctcaaaagcggtcaccaacgacgcatactcggagatcaaagcctccctgggcagccagaacacctcatacgagctggtcatcgtcaggtacttcatgccctgaccgtccttcatcttcgccactatttccacgatgggggcttccacgccctcatttcctagtgtcaaccgttccgcgtagctcgacgcagggaggtcggcctcttccaacggcccctcttcttcgttttcatcactagtgcccagaccctcgggcacttcatccatataaggccgggtccacttgccacaatagcttttgagcctattcacgttcatggtcaccgttttgttagggtgagtcgggatgtcgacccgataagcgttctcgccgaccttggctacgatccgatagggaccgtgccaagcgaaggcaagcttcttcgtgcgcacttcgccgcgtttcgccatgaacacctggtagacccacaccgggtctcctatttcataattcacttcgacttccttccaggcgctgctcgtgccgatcttgcgccttcaacaactgacgttcaaccaaatgtcgcgaggaacggagagagctgtacagctctcgcctatactgagccacttcatcactccgccacttcttgccaagattgaggaaggccacgtccatcggaagcactgggtcgcgcccatacagcgagaaaaacggcgaatctcccagggcctcgtggtaggccgtcctgtaggcaaaaagcactctaggaagataaatatcccaatcatcttgagcctcactcacatgcattcgtagcattcctatgagcgttccgttgaatctctcgacgagtccttgagtctgagggtggtaggcagcaccaaagagtttcttaatgcccaacgtctgatagaagggcttggccacctcagacgtgaagttcgagccgttgtcgctcagcaaccgcgacggcactccgtgccgagacaccactccgttcaccatcacctccacgaacgtcatggagtccaagcgctccacggcgaacgcctcggcccagcgagtgaagtaatcaacgaaaactaaaatatggcgattgccacgctcggtttcgggcagaggccccacggcgtccaccacgagcaacgagaacggccccgtcagatccacaatgggcattctctgcattcgaccagcgcgccacggacgcgcacccttgccacttccgcacttatcacattcgcgcaaatactcctcgacgtcctgtcgccaccctggccagtacgcgtgtcgcctcaccttctcgagcgtcttcgtgagaccgaggtgcgacgacagtagatcagcgtgacaaaaatgtaagactgtttcaacgaacggaagcggtatcacgggcacggtcagcgatcgagcgggcccgacgcgcgcggggagattcactctgcgcatcaacagctcgttctcgacggcgaacttggacgcgatcctcacaaccttcactcgtaagctaggggccagcggcagcgctccacccgtcaggaacgcgatcagggccatcacccacgggatcttccgctgctccaccttcaactgctccatatcgagtccgaacaagtccacgaacgacggagggacgtccgtcggcgcggactcgtcctcagtagcgtcttccggcaacggaaccgcggtctccgtgcccatctcgccgccgccgtctctagtcatcggttcgggcgccacgttggacggctccccgactgagtcggaagccacggctcgatcggacggctccccgactgagtcgttggccacggtctcgggcgagtcgtccggattcagcaagtcggccatgcccacaggcgagccccccgggttcagcaggtccgccatggtcagcgcgttcatactcgcggtagggaggcgagacaagccgtccacgtgccccatgctcgtcccgggcatgtgatgcactcggaattgtagattggacagctcgatcgcccagcgagcgagcttagcattggtcgtgcggttgccaggactgaagatccaggtaagcgcctgatggtcagtgtagagatcaaactctcgcttatctaggtagcagcggaacttccgacaatgccccagcattcaatttcagagattccgtcgtggttgttgatccagttcttctgagagcctgtcagtaacttgctagcataggcgacaacacggtctcgatagtccaccacctgcattagacaagcaccgacagcatacctcgacgagtcgacgtaaagcttgaatcgtttcttcatgtccgggtagactaggataggaggagtgactagcgcccttttcagctggcggaacgccacctcacagtcctcgttccagacgaacggagtgtctttcattttcaggcgttccagcggcgtagagatcagagcgttccccgggatataccggcggaagtagctcgtcagccccaaaaatgaacggatatcatgcacatcgcgcgacctctgcacgttcatgacggccttcaccttctcggggttcgggaggatgcccatgggtgtcacaatgtgcccgagaaaggcgacctgactcctgccccagtggcatttcttcatcttcagtttgaagccggcctgtccgaaggcgaacgaggtgcgacgggaagtcctcgctgaagatgtcatccaactacaccaagcacacgcgccacttgaggtcgacaagcacggtctccatcaaccgttcgaaagcaggtacagcattgcataggccaaagggcatgactaaccattcgaatagaccgtatttgcatgtgaaagccgttttagcaatactgtcttcatgcatgtgcacgttccggtagcctgaggcgatgtccatggtcgagaacagtttggctccactcagcacgtccaggatgtcgtcaatcagcggcataggatagcaatctttgaccgttacggcgttcaacttgcgataatcgatgcagaaacggaagcccccgtcgggcttcctgatcatcaacacggggctggcccaggggctgtttgagggccggacgaagcccagcttctggtactgctggatctccgcctccatcacctcgccgtcggcgaacgacacgcagtagggctgctgcttgatcggcttgctgtccccagtatcaatctggaacttcagcaagtcggtcctgccgggcgagttggacgactccacgaacttgtctcggaagcgctccagatcgctgcggaacagcgacttctgctcatccgacgcctcgactgggagaagtcggcctcgagcgccacctccttgtcgggcggcacatcgggcctcgacgccctcacagtctcgccgagatccggcccctttgcctcttcttcacgactggcagcaacggtgaccgccccgctagtctcgggcggacggcagggcgtctcttcggacttctccgccgacggctgctcaaagccgaacgccgactcgggcaccacggacgtcgaggccaccaccgtgcccttcttgatccagaactcttctgtcgatgcgttgcagacctccacgactcgaccgtcgtccacagtacagagcgttctcgccacgcaaagcgaaggcggcaagttgagagagccctcgacgaggacagtcgcgttcggggcatcgcccaccacatccgtgaccaccagggcctggccccttggcggcaagcggacggacacggccatcgtggccatgaacgattcgtggaccaccatcacgcccaacgataagacttcgcccgtgctcttcagcatgagcgtccgctcagccacgtcagtcactgctccgaacacgcccagcgagtcgacgcccaagatagcgtccacatgcaacttgtcggccacgagcatccgcatggtcaccccgaccttgcccagcattaggggagagtgatccacccccgaatgcgcagacggtgttcagacgaactgcgtacatgcccgtcgtaggcctccagagcttcacgagctcggcccagacgcttcagaacacggaagtcgacgaaactgagcgttgcgcccgtgtccgccaacatctgcgaaggcaggcagtcgatgtacccgcacgacagcgcctcgaagttccccacagtgcacaccacacgccgaccaccggcaactacgcgtgggagctcggctccacactcatcatcgtcctcatcggcacggacgccgaagacatccggcaagttcacggttaccacctccaccatcccggtcttccgtccacgctccggcggtggacgctcgggacggaccacttgcacgtagtgcgtcgcgtcgtcgtcttcttcaggacggagctccccgtccagcgcctcggccgaatcgcggtacaacgccgtgaagtcaaagcgtacgggccgtcgcgagcgacgccgcagccgacgcttcgcactcgccgagtgggcttctcgaactcgatctagtagcttattccaaatatacgcagcgttctcattgtagtactcgttcgtccatttcttcacaggttctcgccagtcgatttggtcttcattttcaccagcaacttgctcaacatcgtgcacgaggcgcactcagtctagatcaggtggcttatcacgaatcggggggatctcgaccgtgccaccttctccgagcgggtcgacgaccgacttcttcgcacgcaacatctcgtccttggtctccttcagcaagaagtacacggccttgcgagcctccgacctctcgctcggagaagcgctcgaactcggttcaggagcgtccacgggcgggttcacgcttaccgcagtgaccatctcatcgctgttctcctcacagacattcacggggaccgcaatgttcgcagttacgctctcctccatcacggagccatcgaccgagatggtcgaggccttcgggtccaggtcggactccgacaggccaaacgactcatactttgtcgcctcggtcgagcgttctagagaggctgctggccagtgactgtttgaagtcacggttggctcgcttggcctccgccgagttctccagtatgttcctgtaccagtcctcccagtactcgggcgaggcgtccttcatcttggtcagcgcctcgaccgggacgcccagaaacttcgacatctcttccatggacgggcccttggccctctccgcattctccttcaccttgcgcatcaactccacttcatcgacggggtggagcctgtcctccagctccttgtcatactcctcgagctcctcactgatgcctggaacggagggtttcggcgcctcgcactccatggcgtccagctcctcgtccgtgaagaggcgagcgtggcggggcggggcggctccttaacgtcctcggccgcctcgaccacctcggaactctcgggcacttccttgctctcggtggcagcgcctcgggcctcctcggcgacagccaactcggtggcgggccctgccaccggctcgggccctacgactacgttgacgttctcttcggcgatgtgctcgccggccggcgatcctccgtcgtcgttccactcggcgaacagtgtgtcccccacatctacagcgccgccccacccttcgaaggagggctcctccgtcatccaacgcggacgggggccttccttcttcaggatgtttcgcaaaggggccgcagtcactgacctcggcaccgctctcaactccgtcggcggcggcatctcctccgtgggcaccttgtagggtatgttcgcgctcggaggtgcagcacagaacgcttcatcgtccgcacggccgcatagaacacatcaccgtcgacttcctcttcctcggagtacgccgactcctccgacctcacggaccggtcctcgtcgtacgccgagtcgacggtctcagccgccgtcccctcttcgttgcctactccacgctcggggctgcggtctgggccactcgcggggtctccatcgcccgcgggggcgtccagcttggccgcctcggcctccttagtctcttcatcgttatcatcgagggcggccccatcatgggcccacaccccgttcacccttgcactcggctcgtcctgctcggcgctctcctcggtcgccgtcttccccgcagggtacatcttctcctcgtcactcgcaacggcccacgccgcttcttcctcgtagcagtatgcaggctcttccgccacgctttcctcattttcgccgtgcacagacaactccgtccagcactcagcttcaccttcttcccgcatggacaacaccgtccgccgctgctctcgttcatattcttcttcgacggagacgccgctgggtacaatccactctttccggggcccggcaaccgtctcaacttccacttccgctcttggcgcctctacgcgttccgcttcgacgctcccttcattcacactactcttcacaaccttgtccaccgttttcctcgccgtgaccgcagaacgccttcgtctcgcctgcctcctacgatcaccccctgagccatcctctagactagagaaaggagtggctccctcctctccttcctcccgcccccgtcactgtcgaggggtcggattgctctgggcggccgcgttcagcaaactcggagtcgcatcacgaagcgcggccaatacggggcactgcatcacggagtggctcgcgtcttggcagaaaacacaaccagacggagattgagtacccccagcggctgcagtctggcctccaccgttctggggcctgtcacactcgaccgcgatatgaccaaacgcgccacagcgcctgcagctcatcgacgcgcgcttgcatgtagcgcgaccatgtcccatgaagttacagcgaccacacacaggcgaaccgtcctgcgtgcgactatcatcgcccatccgaatgccccggaatggctgagcgttccctggtccacgaccgtttccagcgggctgagtggcaggggtggcggccactaccggtgctcgattgcgaggcgacctaggcggctgtcactggtgctgcataagttgctgttgccactgttgttgctgctccatgaacgacttcatctgctcagcgagggcctcgaccgcagtcgtcgcgggggcctcctccgatttcttgttcttcttcttggactcgctgtccgagaactcgtcctcctcctcgatcggacggtgcatgtccttgaacatgagccactcgcacgcctccggaatgtccgacgcgggactcgcgtccaaggtcgccagcatgcgcttgttccgcagtcctcggcggaagagctggtaccgcatctgcggattcgggtagtcgagggacccgcacaggtccgagactcggtcaccccactcctccacggactctccgcgctgcctcttcgtgttctctagcagctcccacagctcgtcagccgtccggctgaggaactggttatggaaccgcaccttgagcgtcctgaacgacttgatcctcgagttgttccaccaccggccagcctcgcggcctcgcagcttctgacggaacaccagcaatctggaccggtcggggaaactgtccgtgtggtcctcgaagagctcccagaagtcccgcgccttctccaccgtggccgtgtccgaatggaacatcggcagcaccttcacggcgtgcgagaccatcgtagacaggttgtaggcactcgacgaaagtccactggcaccgcgccaactcgtcgacggtgcagccgtcggagccggcggagccgtacccgttccaggcgtccgacttgccgtagggcccgttgtaggttgcataggcattccgccaacgagcggcttcgagagcccagccggaccgccggcgaactgcaacttcttcatcggagggggcgacttggtcggcgacttcaccgcgcttccgctcccactccatcttccatactcgggggccttccccgaaccatgttgagcgctccagctcaatccaaaggcagggcgatccgttcggcgggcctcgggacccgtgtagcgggtgatgaacccactcgggcctcgctgcatcgggaccggctcctccatcgcgtcgtggtagtcttcctcgtcgtcggcgtacatcccgtagccgtacccatagtccgtcggctgagcgtagggctgccccacactcgaccgtcccatcggactcgagaccggtggctccggctcgcccttcacggcgggctccgccttggcctccgccacggtctccgtcttcattccagccgaggtcaccggctggactccagtcgcggtctccgtcttgaccgcctccttctcttcatagtcctcgtcttcttcatcttccagagctcacgcatcacatccgacacggacgctccctcttcagcatactcagcggtctttctccaccgctccagactcctcaatccctcttcaaccgggtccggcgcgcccgctccagcttggctgggcggcggcggggtcctcggtcgctgggacggcggcggcgctatcccgatcatcggcgtcccggaagccggtgtcgagggcctctgccgacgtctttcggcacgctcggcttcggcccgcgcggcacgctctgcctcggcgcgctctgcacgcgctctttcttcttgttcagcccggcggcgtgctgcttcctcagcgttaccgcctcttcctccttgtcctcctggcatcttctcttctcagtttaccgttccttgttcacttgacctcttgctcttgaccgtgcacacttggctcttgtgtctacgttaccgttcccttgtcctccggcctggatcgctcctctaactgctcctcgacgccgcttttcccgcgcggcgtgtactcgtgtgcggactcctgggtccttccctggcacactttaaacacgaggaggggggtcacacgtccagtcaccaggtccagacgctcggctcttgactctgttcacttccgggcacaggctctcagcactgttcactccacactcggcaacactaccctgcttctccaccacgtgtcgcgagtcgctttgtcggaccggtttggggccggccgccgctgtattggagtagtaagtgctgcctgtgcttataggtttatggggcacaaatagcaaggagatcactaagcaaaatgcaataagtgttccttacgacctgtgtggtctttttaagcaaaattcacgactgaccttccttctactcctaactcttcctctctacctgcagatccttgcgtttcagtgccttcgggtgactccgttcccgctcacccctcccaaaaacttgatccgttcaccttgacggccctcaaagccgcccaacatgccatccgtccccgaagtcccgccacgacactgcgaggcacatcatccctccacgatacctctgggtagcggcccacgggtctccaccttcgagacaacccggcccacgacccactacttctcgcccgcggtcacagcaggtggatgacctcaggcactcgtcgtcgcccacgcagagttggaacggtccgagccgttccgactcgggacaccactaccaaatgttctggctggtttgccattccgcatccgtacactctgcagcatcgacatgaagagacgacaaggctgcgaatgccaccaaaatggaccaggagcaatgcatgacttgctgagggtggaccgcgacttggggccctggtattggggaatgaagaaccccaaaccgatcgacgcaagaagctcgcaatttgttgaggcaatagtttcaggcattgggcgccttccaaaacctatataaaacggtttggtcattaggggtaggggggattaaaccagacctcccttatactggcacctgccgggatgtgtcggattagctatatttcggcactcttgttttgtttatttcggcacagtgccagtttaaggaaataaagtatgcaatttactacagtttctctagcatatcgaactgtttagcctggaagatgccttcaagggctagagaagtcaacgaagtgcgccggtcgttcagttcacacttcaatacggaaaaatcggattcgacgggcgccgtattcgcgaatacggttgccaatccgcagcagaactggcggagatgtgaaaatgtctttggagcagcagcgttttgcactgaatcccaggcgtcgttgaagctggtctcatacgattcttcctccagggctgtgcgaaccatctcatcaagcagattggcttgacacagctctcgattatcccattcaacggcttcaatttttgcctcactccaaaacaaagccaattgatcgcggcgaggattcaaaatatcttctgcaaactggcgaggagggactgtgacaagctcagctggcattactggcggagccggagatgtggcagcgtcaatgttgctgtctcgctcagcttgtgcatgctccataccttcaattagatgcagtacaaacttggcaagctgcctcagaatcgaatttttgtcggcatctgcaacactattcatgtgattctggacgaacgtcccctggtcttgaataaactcgagcaagtgttgctctttgagccagtacttcgtagaaatcgtgtcattagcgctagattggaattcagagctaggtacgcgttcaactcgtagcagtttgcgaaggcgatcttcaaggagctcaatctctgccatttgctacgagagcaggacatccttcccctgtatcttgacaaacgtgacgttcaccaccaccgttatcccacaaacaacagctgcattgacccaccatgatggcgttggtgccgcagacacgttttcatcaaggtgttcttcgaggcgaaaatggttttttaatatccactgcaatgcgtttcccatgtacagccaccgattagttagttttttggcggcacctcccatttcagtaatcagcgttttttggcggcgaaggtgaacaattaaatcctttgtattcttcacaaagtctccatttccaacaatggcaaaaccggctttcatgaccaggtccatctgatgagcagcacaccacactctcagcaccgagtgggtggcctctttctctaaaagagtgatcaccccaccatgacggcctgtcatagtgttctctccatccgatgaaataccaaccaacttctgtctccagttagcgaacaaaatatcgagtactcgaacaatcaggtgaacttggaccacagcagtgtggcggtcaaacatagggaccgcgagcaagtgtaggttgactagcacgccgttgacggcaacacgaacacgctgattcatgaaagagcgatcggtgtgggttctgatgtcgcaagcaaatgcaaacccccacatattggggtctgcgatgaggttgctgatgcgttgaatcgaataggcaactagaatacgagcataagtgcctgccatagcgtcggtcataccgtaaagcttcgagttccctagtgctgctgaattactgctgccgtctgccgaaacgacaacccaaccgagagatgtttgaccgaaagagtaaaccgcagaggcgtcttaatttccactgtgtagaccccatccactaccgagccgaaagtacgaagagccctcgcaacagtcatatcatcatcttcatcttcagcattgaaaaatacctttccaatcagctcagtcacaatcaactctggaaaataaaaccgcaacacagcactctctgtgtcaaaatgagctaccaattggttgcttcgagaagtgagatcagcaaaaaatacagccttctctgcgtccctgagacctgtgtattctccccacttagctgagtgcgcggaagtattgtgctcgatgtagttctggggtcggaaaggagccttgtagtacttgatattttgagtaagctttcgtctgcccttgggtgtttcctctctaccaaaatatcggcaaaacaggcagcggaccgagcaagccgctcccccagcgtcacacgctacgacctcgagtccgtactgcagcttgtgagcgtcttggaacggggttttacgcgaggggggcttcttagagacgcttggctttagcttctccatcgttcactgcttgaattctgcgattttgaacggtcgcttatttcggcactcgaaaaaacttcaaataggcacatttccatatataaacttcaagtgccggaataaaggaggtctggattaaaccgttcattaaacggagcgattaaacggaattgtttggaggatcaaaaaagtctccgttcaaacaattcgaaaatgggtttggtcgtccttttaatcacccccttatttggcaactcgattaaaaaatatcttaaagaatgtatgggtccaaacagctccctcatttagagatttcgtttgaattgaagttgcgcgcgcgatcttagagggctttaaggcgcgaaagcgcgcgcgctcgcacagcccacgcctcatttagaatctcgcctcgtcgtgccgaagcccccgcctgctgcaaacgtgtacgtacactgtatgagttgctgtggttgtgcataccagctaaaagattgttgattcactgcctaggcaaccatgcacccgtttcccccgagcaagcgccgccacgagacaagctgtgctcacgagactttgagtgctctcgtctccaaacgccgcaagctcagcgccgtggcgttcgacgccgctgcgatcgagtcaaaccgctgcaaagcgccatcagcagagccacgcagcgaggtcgctgctgatgtaccagccaacccacttcctttggccatcgttgctgtcacgcccacgggaccaccggcgggacctcgcgccggcgcgaaggtcaagaagaccacggtgctgacggtcgtcaagaccgtgacgaccgtgaagactactgtcacgacccgagtgtcgccacgcgcgacgccctccgccgaggaggaactgtccagagagatctccgagcactcggcctcgttgccctccggcgtaggagcccccgctgcttctgaccaccaatggtcggcgtcgccaaggacgcgatccggtcgggtggtgctgcccgaaggcgtcaatgcgtctgtgacgatgcaggtggctccacttgcggagtttcggctctccccgcctgcctcttcgggtgatggccccttcagtcctcgttccagccagagcactgagacggaaccatcgcccccggtcacacctgcgcgctcagctccgagtctagatgctgcatactcgcctgcgacggcaagttcccaaaccacgactcccccgtggtcaccccaaagccccttccggtcgcgcctgcacaaacgtgcagaggttcttcctgcttggtataccgtggcggtcgcctccgacagcgacgaacccgagacggcgccgctcatcggctccccacttccagctgcacgcccgtcgttcaccgcctcgcgcatgaactccccgggctttactgttgtcgaaggcggtgccgtgaacccaccccgcgacgagtggcagctcgagacgtggccggatgacgtgcagttcacgtcagcgcagctgaatccgcgccgctggaagttcccagccgtcagcgtgggggtgagaggggggcttggctgtgggtgcgaggagcgctgcaaggcaagcacttgcctcaacgctcgaagcagcagattctgcacggagtacaactgcaccttcgctgccgagtgcggcaacgggcttcacgaaagccgcgcactcgcaattggtcgcaacctgcgcactggaatgcgcagcttggtagcgcaagctgcgattcctgctggagaagtcatcggacagtattttggccacatggacttgttcgggccgccctgcaagaacggcccagtcaacgacggctacagaatgcacctacggacccgcactacgggcaacaagttcatcggcatcgacgccttgaaagtgggcggcaacctccgcttcatgaaccacgcctgcaatccaagcgcccggttccacgaagttcaaacgggccagcgcctgacggtggtcgccgtcagcattcgtgatatctacccgggcgaggaggtgacggtctcctacggcaacaagttgtggtttgtctgtcgctgcgggtggtcggggtgccagcatcgccacctgcaacacttgcaccaggactcggactctgcttgaatccacctcccgggagcggctttaaggcagctttgcattgaaaattgtgtacatgttgtgtaatgaaatcttttgaaattcgaagcttcctgattgacatactgaacatcatacatatgacccaggacgcgatgggttcattcgccccctcgacggcttcgacacaagcaacgacggagagtatggcggtgggtctcgtacagctcgttgtctcccttcgatgcgttcctctttgggtctaacctgcgtcgtatcttacgtgtctatctacagcgaggccggcagcaaggataccagaactacggtgctaacgaggagctttcctttgcgacttggccgcaaaaatccttccgactggaaagaacatgtggatggcgctagcggccgagtacaatgactccagggaccctgcctggcgggaacgcgactttgactcactgcggagaaagtttcgcaagctctacgggaaggccaaccccacgggcaatcagggtgaccgcctgacgctcaaacagcgagctatcctcatggctcatgagactcaatatgagatagagaagaagggaggggcgcacacctcgcacgacgggcgcgacaacggagaggacgacgagaacctcatggatgaggtcaacgtggccctcttcgcggacgaggtgggcaagcccttcaccgtgaaaccgaactcggtctcgaccaagggcggtggagacagcaaccgtgctcggatcgacaagcagcaggaggatgacgaggaggaggtggcggaggaggacgacgagtcggtctcctctgtcaactcggtcaacgacgaaaaaagctcggaggagggtacgtccgaagaggctgacgccaaccagcctcgtgaccccccccccctcttcctcccgttgccgagcttcacggcagcgatacgcggcttgctggggtcgtgatgacccagcagggccttgttccggtcgagttcgctgctgacttccagcaggctgagtccaaccttggcgacggagaggtgcgtgatgcgcaagacggccaaactacagctaatggtgcacggagcgaccgaagtgcggcctctgcaacgaccattgacgctcgatcaacgccaaaggcgttggcgaggcccacgccggtgacaccgagagctgtgggccgcccgaagcgcgactgccaacctctggcttcggtggcttcgcccgacgggcccaccctaacgcgaaacccggatcgtgctgcttccgatgcagcagaggccgaaaaacacaaacggctgcacaacaccagtgatcgcctaggtgggcgagatctacgagttcttcgggacaactttgaggtgatgggtgggcgtgatccaggagctaaagccaaaagccccccgtctgagagctcggtgacggcgatgtacgctgcgtcgaagagaaaccaagccaagaagcacatggattcaattgacaaagaattgaaagaagcagaggctgccgacgctgcaatgggatcggaaatgaaggacctactgctcttctttcgcgaagacgccgatcgcagagccgaatccgagggggagcggcgacgagaggaacgcgacaagcggcgcgcagaggataaacgagagcgagatgagcgagagcgggttcgtagggaagaagctgcgcttgtcgaagccagacgccagcaagaccgcgaggatgcaaaacaacaccttgaggccgaggaaaagaaagaggaagcagctcgagcggagcgtcgagaagaagaggccgagcgtcgccgacagttccaagcccgccttgagcaacaccgtgccgaagcgcggcagcgccacgagcaaatgatgctactgatctcgacgattcacaagaacaagtagtatacagcaagatgtgtgcaggaaggaagacatagtgtattcaagttgcattatgcacataaacaaactcaactcactcttgtgtatctcctatcgtcctcaccatgaatgaatgtggttcgtatctcactaatgccgacggttctcactctgtagttagttagtctgtccaaacgctgctgccgtttgctgcggtcgtacggcaacggcatcagcagccgatggtagaccttctcgatagaccccgtaccccgctcagcactctctctaatggacgttattgcctctgataaagccttcgccgccgcccgaacagaaggcaccagtctacttgcatctccgtctttcagcggggtcatgatcctgtcgatcatgtcaccactgcaagggaaagcactgtctgctacaaccccatatcgatcgtcagtatttagttccgtcgacaccagcttccgcctgaactctaggctggtatcgccatcgttccaggaccctggacagttatgtttagcccacacgatgagctcgtccgctgagaagcatagcgtgccggtgacgaacacgccatgtagccaaccgttgtagtgagcattctggatgtctctatctggaggctgctgcacctgtgaagtagaagtatgatatgtagatggtaagatcacgaacaatgatacaatacaatcatatcttgacgaaagtaccttgtagtttgtcccatccaaaaagccccatgtgaactgcagcatgggttgctttgctgccactagacgagctaaagctttctgcctggcgaacgtaggccatacaatccgagcgggcgcaaaccctcggagcgccactgtaagagcgtcttcagctgcagttagcacgcgggtaagcgtcgtcggggggacgccaaacatgagacacaggcgccctcgatactcacagcctacgtagaaatctagaagcaagcccaacacctgatggtggtgttggagctttcgaggccgccctcctttcgagtagaagatgggaatctcgtaatgaggcgcaaagcgagatagtagaaggttgaacaaggccctacatgtcaagcaataacggcaaacaacagttagaaaccaactacacacttaaatgctgcatgccgcccttaccgagacaggctcgtcacatttatcatattctcgtcggttcctttgagccaggtgtccatccaagaagactgctcaggctcctttaggcagtccagggtgatgtaatggcgcattcgggtgagccgctgccactcccagcgcctgcgctcgtcgtgcagccggcgtctcaagtctcggagcgtctcgagggagcgacgacgcgtctgggacgacgcacagagcatcagcagaaagctcgtatccgggcgagacattgtgctggatgaagcgcgagagaatgcgaggggggcaaatgactcggttgctcgtagagggtcgacgcgacgtttcccgccgagcgagatctttacaattagagatattttgtgaaaatttgttcattttcggattgtctcctttcgacctacataattagattaaggtattcatacttcaagcggcaaaggtcgccggacacagataacttttaatggtggttttggcctaggtgtttatcaccttcgatttgcagacgtttggtccggcgagtaatgcgcctagtcgggtgatcagatttttcgattaaactttttgatctaggttttggtaggcgcccattgtgtcgccgttcccagctggactaacgaggcagaggcatgaagtatgacgtgtacccgttagtttccgggagattgattaggggtttcaaagtaggatttcgtcaatagtcaggtctcgtcatggtgacgttcgttggtttgggaatggagctatgctgcatattgacactgaaattgaaggcgcttggtatccttgatatgggagcttagctgccctagaaagctaggatgagttctgccaggagcgaggcgatggccgtcaactggagcaatcctgccgaagcgcgtggtggtgtcgcgctctccccaacttgtccgacggttgacgagtccaatgttgtgtcagctggatctccagacactagaggctccgagtcggacgtcgtgtctccattcgaagggggctccgtgcccgactcggccgatgatgcggacgacgaagcaaactcgatcgagctgtccgggtacagcgtgacgctgatgtagtagctggaggacacgtcacagtcgtccagctcctcgagcatgtcctgcttcttgttcatggactcgtagtcgtagtagcagttgggcagcgcctctgcgagatctttgaccttgtcggcgcagtcggagctgcaagaggtgaagatgtagacgctgtagccgttgactgtcgagtcgtccgcgcactcgtcgctctccgcagtagaaacatagaggttccacatctcattgacctccgtggacgtgcagcccgtgttggacgccgtcgacgctggcgtggaggacgtcgtcgacgttgagtcgctcgaagtcgacaccggcgtgctggaatccacttcgcccgtggaatcatcagtgcaaataccaagattgtcggtcagctccgtcttctggttagctccgtcgtacagacagtcaggaagatccgccgcaagctgcgtcagtacagccacacagtcggtggccgagcatggcgcgtagaacgtcaccaatagagaggaggacgttgcgtactcggagcacgccgaactggcagccgctgcgtcgtacagatcttccgtgctctggtactcgtccgtcgtgcagtccgtagtggacgacgacgttggggtgggggttgtagtcgttgtggtggccggagcgtccgtgacggtcgtcggagagcccgcgtcttccgtgtcgcctccgttgcaggccgtgagcgcgttctgcagctcgatcttgttgctgacgccgttgtaggtgcaggcgggcaggttctcggccgcgacttccatgtagctgatgcagctggtggcagtgcacggggcatcgatgtagaccggatcgaactgcgtcacgtacgacgagcaggccgggctggtggcggcggagtcccacaaggaagcggcgtaggtggcttccgagtcggtgcactcggcggcgttgacggcggtaaagagtaacgccaacgacagcagcgcgagtagagaacgcattggttaggagagttggcttgcgttcggcttgagtgggcggtgcgcagggaattcaaaagtgagtgagcgggggtgggaagcgtatgtcggcgggggctgcgcgaagtgtagccatttgatgttgaagttggctttcattgggatttgtatgggaatggcttcggacagcaagtcagcggcgcgactaaaagtcgcaccacttgcacgggtacgagtatagctcttcaacgagtagcggaggcgtccgaaggggagctcaatgggttgaactccccagcacttgattctgctgcgtgccgctgcgcaagacgctgatggtgtgtgtgtgcgcgcgcgcttccagcaacaagtcgctcggttggggcctggtattcatatcacttgatgtaagtcagacatggcgcgcttgttagtcagactttagtcgcaaccaaactatggctgcatgtatcccttccagcgctgggatgaacaggagagcatcttagcaacggcaataaaacagcggcgttatgcgcagttgatcggcgtcagcggaaatcagcctttgggtggagagattcgtccagctgtccttgcagcagtatgcatacgaatcgtgaatcaccctcaccctcgcgaataaaagttttaacgcacgatcaaatgactatgttgctaaatgatgaagaaatatgcaagcctacaaggactactaccttccggacgagatgctacatccgcttagctcgagaacgctacaacaacccccgcaacaagcgtggacacgacccagaagtgaagtttgccctcgtgcacacgcggtccagcagcgctgctcccggacttggagttcgacgagcccaagatgttgttggactggtctcccgaagggagcatccccgtgccggacgcggcgctcggagccatgactgttgatccagacgtgatcgatccggacgaggacgacatgtcgaagctggagctcgagcccttcgatcctgaaatcaatcccgacgacgaagcggttgaagacgagagcatcgttgagccatcggcttggctggaagaggaggagaacgtgagcgagcccgcgtccttgacgtctcctccgttgcattctgtgagtgcgttctgcacctcgatcttgttgttgatgccgctgaaggtgcagtcgggcaaatccttggccacgctttccacgacggtgacgcagtctgttgcggtgcatggcgcattgacgtacacggggtcggtctgcgtcacgtacggtgagcaggccgacgtgttggcggcagcagcccatacagagtccgcgtaggcagcttcggcgtcggtgcactcggtggctttggtgatcgtgggggccaacgccagcagagacaggagaaccgtgaactgagctcgcattgttgatgagaaggggagacttgagtggggtgcggaggttttggaagtgatccagtggagccgcagttcagcggaaggcatgacgttgaagtgggttaaacgcctttttccttacttccttggaaggcgttagcgacgcaaagtccatagtcgagagccccagcaggcgattgtcagatgtcgagacttgaatcgatagaagcggccactgcacgagctgagcagtccgcttgctggaacgggcagcagcacttgatatcatcacgttgatggtctctcatgcgctcgctgcagtgctccttgcttgcttaactcgccagcatcttttccagggtcggagatcgctgctactatatagtccttcgctcttgggccttgcaatggccagcaggcgaaaaccttggaaaagtctaaacagtccagcgacaacggaacggccaaggacactgggtaaagtggcgggtgccattgagaaacacggtccgctagcgcctagaccgctaagggcaactgcatgctgcatactatcacaaaaacaaaaaatattttatccacattgggtcgtcgtccgctcgctcgctccttgatgcaggtcctattactccctctaaacgagtccggcgacgaaggcgagcgcgagcgcgatcgacagagcggccgcgggcacggagccccgcgaggcggccgacacgaccgagccgctgcccgtggcgctgcccgaggccgaggccgactggtccatcacggccgtcacgttggcgcagtacgtgacgatggcctgcaggccgctcttgcggtcgatctcgtcctcgcccgtgcagtccggcagctcgtccacggcgtcgctgagcgtcgagaggcagtcgctgttcatgcagtagtcgagcgacgacgcgtccgtgtcggcgatgaggtccgcgcacgccgtgctgttggccaggtcggcgtacacgttgtccacggtggtctgctcgtcgctcgtgcagttggcggcgcaggcaggggcggcctgcagcgccacgagcgccaggagggcgacggccagcgtactgcggatcgaggtcatgcttcttctgagttactgagctgctgtgggggactttcggttgtgctgagctcgagcgagccggtcttcgctgcgctgcacttcagtctcggaaggttcgcgcagctttcagtgtgactcacgcggtacccgctgaatagtgtgggacctgcgtacgtggctgaaagcgcaatttttccccatcgagaagagactggcccggcccgctggctgcatcggccagtggccgatggtgcaaggcgatccatgcatggagcacagggcacgacaccgcactttgcgctgccgacataagatttctggctggtctagaagtactagttctcgcagtgtccaggctcctttttcctgtgagaattgatagatacggtccttaccacttcaacttctgctgctcgaagatcgcaaaaagccaagagctgcaatgtctagctcgaggctttggtgactgcatcagaactcaagctcaccgagctggagatgtcattttggtggcgaggccgaggatggccagatagctgggcggttctgcctcgcctgtcaatctcggccaagagactgaatggctagaggcgcttcgggggcagggacactaaccgcaactcacgttggaacgggcatcgtctgaattacatcggggttcattacactccacgacaaaaagatatggacaccaccaaaagtggctgtaacttcgtcaatttttatcgttttaaggtgcggtttggactagagttgcagaacacgctgataaagatctgcacgttgctaacatgcgcgcttttgcgcttcttcaggtagctcacatacaaatcactggttctgcccaggtgacaaaacttatggacagctaatccccatacaaaatcctagattaatcaaaacctcttacaaatgatacgacttggactttgtataggcgacaaaggaaccagcctcacggggatactcgtgacgttagacaaatatctgatggtattatcgtgtactagaaggtgtgtttagtaacctgtaataaattcatcgatcatcgcacaaaactgagcaagtagtaagcgactgaaatttcgagtggtggctaccatgtattatctgatgatttgcgaggcacgttcagttgcatcctagttagtgccaatttgtagctctgtatgctgctatctcttggatatacgattgtcttctcctttctaaactgttggtcgatgatatatggctcagtactaaggtagagtggagaaatcatgggttcctttgtcgccccgccccatacaaagtccaagttgtatcatttgtaagaggttttgattaatctaggattttgtatggggattagctgtccataagttttgtcacctgggcagaaccagtgatttgtatgtgagctacctgaagaagcgcaaaagcgcgcatgttagcaacgtgcagatctttatcagcgtgttctgcaactctggtccaaaccgcaccttaaaacgataaaaattgacgaagttacagccacttttggtggtgtccatatctttttgtcgtggagtgtaacaatggctcacatgtaatcgagcggtgaggaaggcgtcactcacaagctgataagtccgcagtaccgacgcttttcacctcggttgtagcagacaccgccaacttggatgcaggaaggagtgtcgacggtttagtacgaggctgaagacgacgctgcgggcgatgagatcgtcgcgttccaggctcttgtattcatcgctcgtgtcaccggtagagttgtcacagtcctatcatcgcacagcgccagtgtatctgcgatcacctgcttgatgttgtagccgccgtaggtgcagtttggtagtcgggtctccacgtcggccaagtacgtgacgcacgcgtttccagcgcagtactcctccttgttggcggctgaagtggggggccctcccatcccaaagcagtcggcactcttcgtagcttccttgttgatctcactgatcaatgagacgttctcgatcgagcagactgggaccgtgtccagcgtatcaatggagatcgagattgagtcggtagcattccatcctgccctcgagttgaagccggacgatgccgatgccaagcccgaagcagagaccgacgctgtatcgcaccacgccacgagcctactcatcgactcgccgaggttggtgccgtcgaactcgcagtcgggcgtgtctggctgcagctggcggacgagttgcatgcacgcgccagcacagatctcagctacgtcgttggttctcgggtccaaggtgctaccggtgcagtccgcactgctggagtacgtcgtgaccacgttggtgagctgcgtgagttgcgtcgtgttgcaaaccttggccgatgcatttagcaccagcattacatgtagagcggaagccagagcgatgctagcccacttgagagtagtaagacgcatggtgaactacgcgacgttagcgtacgcttggaaaaactcgaagtgaaggaagtggcgagttacgagcaggcacggatagtcgcgtccccggagctgtatccattttgggatggtttcacactggtccagcaaggatgatgggttaaaaacttttgcttgtttcttggctctttgcttgtatgttcgtctccgatttgactatcggtgcaccagctatatagttcagctggtcttatcgtttcttctagcagcttccgtcgctgcgactccagcatcttttaacgcctgtccgaatacgtgactgcagcttaggcgcgctggtggtccaccagcatgaggctggccacaaaagtcatcatcatcttgggcttcacttccacgatatcctcgtacgtcaggaacaccgtcgcgccgatcttctgcgcacaactgatcgcgtacttggcgttgctggccttggcgtcgtccgtcttgtcctgcaacaccatgtcccagttaacggcgcgcggctcaacagcgtgcaccaagtcgagcaggtagaggccgtcggacagactcgggtcacggaacgacacaatgttgcccttcacctgtcctgactggcggaccttctcgttggcccagccgatgatgtccttgtcggtgatttcgccacggcccgcggccagctcgctcaagatcctgagctgctggtagcgcatactctgccagacgatcgagaggatcatcttcttcgctccctcgaagatgtcagcgccaccgacattaaccagcgagaacttgagctgcttgcccaacacgacgcagtagttgcagttctcgacttgcttgaacttgttgggcgccaccatgttgaccttgttccaggccacaatgcccttctggatcttgtccagcaccttgagcagcttcataccgtcgctcagatccgagtacaagtggttgatgtacacgtcgtcgatggccagtgagttgatccacatgcggaagacgcgctcttcacgcgtgtccccaacgtcgtcgtacaggatctcctccagctgcttgatctcctcttcaacgacatccaatgccgggcacgtgttgaaaagctgggccacaaatgacatgttgagcttcgggttgccgctggtgatatcgcggggcttgatgaaggtttccacttccaaacgacgagcattctggatgacgtgagctgcgcgctcctcggggatagcctcgttacacaagtcgcagtgctggggagcgatgtggtgcaacagcacgctgtatgcggtcgcatcctgcacgtcggtgctgaagttcgtgaccttcttcgggtggcccgctgccttcaagtggtagttcatccatcgcagcagaatctggtcaggcgggagcttcatgaactgttccagcgtctcgccatccagcagcagtcgcataagctcggggtggttcttcaagttaatcgtcgacgtcagctggatcttgataatttgccagaccagacccagcacgaggatcggcttaccctcgatcaagtcgtcggggccaatgttgaccacactgcagccgatactcttggcggcgttgatacacaagttctggttctccgttttctggtacacattcagctccttggctcgcttgacgaagttaagagcgcgctcatcaatcgtctcgggcacagcagcgttgatcagcttacacagcagcacaccatcgcacaccgcccggaacaaaccagcatccataccaatcggcatcaatgacgcgacgtccttgtccgcgtgtagcgtgttgttgatgtgctccgtgaaggcgacagtttcttcctccgagtacgagtgcaggccgccagcagtgcccttcacctcgtggattgttgagttgtactgggccgctgcacttgcgcgtcgctgcaaaacactcagcgtgtgcgcgtccacattagcaggcgctggcgatggaggtccggccgtcttcacaggagaacgcgggggcgtgcgcaccactggagctggaggcggcgtggcaggcggccactgtgcgcgcatcggtgcttctgcggcgggcgaagcgggcgtggtagttgcagcaggaggccactgcggcttcgcagccccgttgcctgcaggcggccattgcggaggcttagtagataccgggcttttcggtgcaggcgcagtcgggggtgatgcccgaggccattgggacttcggggcactcggtgacgccactgcaggcggccactgcgcttttgtagggctcttgtcggcagctccgccggcaggaggccacttcgcagttaccgcaggcggtgccggcgcggcaacaggtgcagccggggtagacgacgctgccggaggccactgcggctttgccggcgcggagtcgctcgatccggcaggcgaccattgtggcttcgcgtgcgtagcggccggaaccggagctggagcttgcggcgccgacgacggggtgtgtccccacgatgcggcctggttggcagcgggcggccattgcggcttgctcgctacaggagctggggccgctgtgggcgtcgtgggggtgcctgcaggcggccactgggccttctgcgcgaacgctggggcctgctgctgcgtgggctccggcgtctgcgtctgccaagtcgccgtcttctggccggggaacaagggcgtgggcgtgggctgcgtctcggcagcgggaggcggcgcgggggcctccacaggcgccggagcggggatctccacgggcacgggcgccaccgacgcgtggcccatgagcagcgccgggtccagcgcgatggcgccgttgcggaagtcgtgcagcagctcgaggaactcctggaacgtgatctgctcgggccgcgccagcttggtctgctgcagcatgaccgtcgtctggttgggcgtcacgttctcgccgagcttgagcagcaccgtgtgcagctcggccacgggcacggccgccgcgtagtcgcggtcgtgctccttgaagacgcgcttgagctcgtggatctccttgggcgagaacttctgcaggaacacggacgagacctggtagctcatgatggtcgtcgttagtcgattaaggggcgaccagggggcggtggagagcgcgcgtcacgcgagaagagaggtgagagaggggggaaggaggcggggggcggtgggggcgaagcggggcggcgtggggggccgcgcggacgctcgtcgtggagggatccgggtcttgtcttgatgcttccgccgcctgtgtgacagtgatgctgcagcttcaagagggaccatttggacccgtcaaatgtgatcatcataagtgttttggcagggattacggtgggacttgctgcaacacacgcgcaactgtgggtggtgttgaagtggtgtagcgcaacatgtgtgcaacttgcggcgtgcattcaaccaacagctgcgctacgctgatgatgatggccgggggcttcttctgcgcagaagccttctcctcccccgtggagctagctacatgtacaggacaggaagtccgccggtgacgctagctgcatgttgcgcgcgccagcacgagcgcgacgaagtgaccgacgcaagttgcagcggccccaccggtcgccaattgacggctttgctcccttgagagaaatccacccaggcgctggcttccgatggggacctacaatttacaggacggctgcgcaacgcgttggagagatggagaaggtcgcaggtatctactgtactgtagtcgttgcttccggatgctgtcgctcatggcattgccgtcggaagcgtccagcctctcaagcatggtactgtgtggagcacaaggcccctggaaatccgcgacggcgcttgccagtaaatccaagagatgaaggcgaaccagccatgatgacttcgctgcaatgggtcgtgcggcacaaacggcagcattcgtggagccaacatcttgatgttcgttgctgtatcgggcggggtgtgccattttatcttttcactacagtctcgcagtgacgtaggtaaagataatattgcacacggcaccaggctcgccgctgtgctcgatgaggactaccggtaggcactagcgagtatatttcacttttgatattgcagcgcggacaacagcagcggcggggactcagggcatcaaacagatagaggaatctcagcacacgtagctcggaacaagttgcgatggcgataccgaggaaggcgctgttgatcatcggcgtggtggttgtactagccattgtcggtgcaatcatcggtatcgtggtaaccaagggctcgtcgtcaagctcagcaagcgcgagtgacggcacgactggatctggcattgccagtggcagtacgagcagcacttcaacgacaacaggaagcagcagcgggaacgcaaagctgtcagcgtcgaaaaggtcgacaggcagcggctcgtccactattacgtcggacccgacgagcgcgaagtactcgctggcggccttcgctattggcgattggggcaccactaccactcagagctcgtgctgttcgcgctcagccaacttcaacgactacgacatcaacgctgaggatgtggtggcgaacgtgatgaaccagcaggcaggtaaagcggaggtcgcccccaaaatcgtgatcggccacggcgataattttgcgtcagtcaagtcctgggcgcgacactgtccacaccctgtcgagccttttggtccgcgtgcactcgaacccattgatgatcaacgatcaacggttgaccgtttcaacgccgatcatgtagtcctcccgatacatagcgaacatctacgccggtttgtgaatggccttggacgtaccgatccactaactacttcacgctgtaggccacggttgctggtgaccggttcttccttgtcgaagtcgcaaatgttgcgcccgcccgcaaaactacacgcagatgctactacgtgaaagctttacgagacgctaatagagcgattttgttgtaggagcacttaccccgctttcacctcgctataggactactaactagttagtaaccttttctatatagtatattacatgcgactcaaagcaattatgtggccggtgcatgatacactttgtagctgcctcagcacgtacacttcttgcacttctttctacatgtagatacgccacccaacgataacaatttcgaacttattttctccagctcgacgtcgtgaaagtcgaattgcccgctgtctcggcataactgtctactgctacacaggagacagctcgatcaggacgaaggccacagattcccgtgcgaattgagacgacctttggttataaggatttcaaggtatttcataaagtcatgaaggtaatgatctgtgcttcgttctgctatcgcacatgcagggataacgactaacgcacatcagtttgcaatgtacggagcctaaatcgggggtgaaaagctcgcacgagtggatgccgcggtggcactgccgcgcgcttgtctaccttcgagcaccgcttgaagcaatgaggaaaccagctggttcgtcctgctggtgtcgtccgcgaaaaggggaaagtattgcgtgtaatttagtaaaccggcgacgacctggaatcctttctattgcgcggactggacgagttcggcaaggcgagcttttgacaaatatatccgtcggatgatctgaagtcgctctttcagaacgtcaagggtatacccgggcaacctgaggtttcaccaacgtttcttgacgaagccatgaagagtatttcgtgctggagaaaagggcaggatgaagctatgaggattttgtggctaatttggacgacatgtactcaatgcacgttttggctgatgcgaaatagagaagtctttgacggagatcaagtaccgccacaagaagctaagcgaatcttgtggaaggcagctgatttccagacgcatgcagtcatccggggaatggcttcacgtccagcaaccaaagaagcgagttttcggttggaccagtgctacgcggttttcttggcaattcaaccttcagacaggccgatcgcaattcagcgctggactctcacttttcactctgtgaaattggaaggattaccagggcgaagaggtatttgggtggtgttggggaacgacccacaagaaataattgccattggttttgcccaaaagaacgagccagtcacggaaactagtatggctattcagctcatcgcccgagccatgcatcagctaaagcagcgagctcaactatctacagtctctctttgtgtccaaggcatccaaccaatgatcaagtcggctcgagcccagaatgccacgcaccaagcgcttaaagacgttgtctcgatagcgtggaaaccagcttccaaacgcatctacaaagcgatcaggggatttctcaaattgcgacaactatctcagtttaccaatgctgtactacttcgagagcacctgcctgccacgctatgggactacctgcaagaacaattttcgccggaggaggaattatcccaacaccgtttgtcaattaggctcagtctacagcgatatcaggactctatagtttaaacaaacgtaaatagaggacctctgaacacacacccgggctgattcacgtgctagtggattacccagaaataccacgaagcgcctgaagacagccagccagcaagtgccgtcggcgatgtggaagctctgaaagctactgctttaagagctggagccttaccgcctaatgatggggacttctccaagttgctcaagtggaacgacggcgactgcggggggggggggggggtgaaggatattccagagatcgaggatattgtgggcttcactggaccgaagtttttcgtgcggaaggagatattgtgtgtgctggagaacttgaaggagtttttagaagtgacgctttcacgacgagaacccaaggaacatttcatactcatgggaagcccaggaacgggcaagagctgcattttagcgttggtctgcttctacttggcacttgtggaggcaatttcagttgtgtggcaccgccgtgttggaggtgggagcaacgacctaccagttacacgtttgttcgacaagggcaaatactacgagtggtacgacgttgattgcagtgtttacaagtcgctgcgcttgaagtgtacggctgatttgcctagatgctggtttgctcttgacgggttgaatcaagaccagctcaacgaaaaagatgtgggcaatatgtacatgctgctggcgacgtctgggcagtttatcttttctggtcgtgttgagttatctgcttgttactaacgtatttacttgttgacagatatgtacgatcagtgcttcgcccagtttacaacttggagcgacgagtctcgcaagcagctcgcggcgaatatcgccaactcgacagcgacgtggaaggtggttaattctcactacttgccctacgctcactactctgaggctggaatgaagaagtggtttgacatcattcaagacacgggcgttcacctctggctgaacggccacactcacggcgagaaccacgactactcgtccacgtacaaggttcacttcgtggacaatggcgccggcggtggcatccagaaggagtctgcggccggcattccgagctacgcctccagctacgtggagaacctgtggacgtacgacggccaggagtacggcttcttctcgctcactgcttccaaggactggctcaagctgcagtaccacacggcggacgacaagtggtcgtacgccaagagcttcaaggcttccaccatagggggcgtggcgacaaagcactgctggtacgtgccgaacgacggcaccgagggcaaggagtgctcttcgtccacttcctcctcgtcctcgtagatttccagcagcgtttcaaatctcctgcatgccacagcctgtcaaggaatttgctggacgtgactcctcaagatccccccgaacaccgaagtctcccggaaaagcatcaatacacaagctactgtatgcatacatattgcatggcccaagcgcattaaaccctcgagttctatcgacgaggacagcatgcccaagggcaaggaagaatctttgggcccaagtgtagaggcattgcgctgttcgtgtgtgccgtgggatcactctgcttggccgtcataaccggccaatcagcggcggctctgactgagacagggggtccattaccttgcacctgcagcgaccggctcagggcgcgctggctattgtcgctttgctgtgctatcctccttccgctctctcactcgtgaattcgcaccgcggaccaggacttcgcttctctcagcagcagcagcagcgtcgtacaaacagatacagtaggacatggcgatccctaggaagggactgatcgccatcggcgtggtggtcgtgctggccgtgatcggcgtcatcgtgggcgtcggggtcaccaaggactcgtccagctcggccagcaccagcgacggcacgtcttcgggctcgacgtccacctcggacagcagcacgtccaccagctcggggggcaccaccaagtcgtcgtcgtcgtctgccaaaaagaccagcactgggtcaagcagctcggcttccagcatcacgtcggacccgacgagcgtcacgtactcgctggcggcctttgctatcggagactggggcacgaccgtcacgcaggactcgtgttgccaatcttcgggctatacggactacgatatcaacgcagaggacgtggtggccaatgtcatgaaccagcaggccgcggacgccgatgtcacccccaaggtcgtcattggccacggagacaacttttactggtcgggtatcaacagcgaagacggtcgtgactcccgtttcacgacgacgttcgaggacaaattcgatggagacaacatcaagacgatcccctgggtcaacgtgttgggcaaccacgactacggtggtgccgactacatctgctcggatggcgacaacacggccaagtgcagcagctcggacgacctcgtggctgctctgaagaacaagttctcgtggcagtccacctacaccagtcccaacgacaaccgctggattctggaggaccatttctacgtctacaccattgagaacgcagactctggcgtgagcatcgacatcttcaacattgattcgaacgatgccgactcgcacggcgctcaggagacgtgctgccagtgctacggatacgctggagatgacgacaccacatgtgcgaacgttggccgtggtgacgacgcgtgtgctggaggcgatacaggtacgctctactcgttttgctctattgatgccccctagacaacctgctaacgacagcttatatgaacagatatgcacgacgcttgtatggacttgctcacgtcgtgggcagacgactcacgcacgcagctcgctgccaacatcgccaactcgacggccacgtggaaggtggttaactcccactacaacccgtacgcccactacgctgaggctggcatgcagaagtggttcgacattatcaatggcacgggtgtccacctctggttgaacggccacacacacggcgagaaccacgattattcgtcgtcggtcggtgtgcacttcgtggacaacggagctggcggtggtattatcaagcaatcggccagcggcatcccgacgttcgcggagggcttggtggaaaacctgtgggtgtacgacggtaccgagtacggtttcttctcgctcacggcctcgaaggactggctgaagctgcagtaccacacggccgatgacaagtggacgtacgccgagagcttcaactcacccacgatcggtggggtggccacgaagcactgttggtacatccccaacgacggaacggaaggcaaggactgcacgtcgacttcgtcgtagaccagcactgggtcaagcagctcggcttccagcatcacgtcggacccgacgagcgtcacgtactcgctggcggcctttgctatcggagactggggcacgaccgtcacgcaggactcgtgttgccaatcttcgggctatacggactacgatatcaacgcagaggacgtggtggccaatgtcatgaaccagcaggccgcggacgccgatgtcacccccaaggtcgtcattggccacggagacaacttttactggtcgggtatcaacagcgaagacggtcgtgactcccgtttcacgacgacgttcgaggacaaattcgatggagacaacatcaagacgatcccctgggtcaacgtgttgggcaaccacgactacggtggtgccgactacatctgctcggatggcgacaacacggccaagtgcagcagctcggacgacctcgtggctgctctgaagaacaagttctcgtggcagtccacctacaccagtcccaacgacaaccgctggattctggaggaccatttctacgtctacaccattgagaacgcagactctggcgtgagcatcgacatcttcaacattgattcgaacgatgccgactcgcacggcgctcaggagacgtgctgccagtgctacggatacgctggagatgacgacaccacatgtgcgaacgttggccgtggtgacgacgcgtgtgctggaggcgatacaggtacgctctactcgttttgctctattgatgccccctagacaacctgctaacgacagcttatatgaacagatatgcacgacgcttgtatggacttgctcacgtcgtgggcagacgactcacgcacgcagctcgctgccaacatcgccaactcgacggccacgtggaaggtggttaactcccactacaacccgtacgcccactacgctgaggctggcatgcagaagtggttcgacattatcaatggcacgggtgtccacctctggttgaacggccacacacacggcgagaaccacgattattcgtcgtcggtcggtgtgcacttcgtggacaacggagctggcggtggtattatcaagcaatctgcaagtggcattccgacgtacgctgaggattatgtgaagaacctctgggtgtacgatggcaccgagtacggttttttctctttgaccgcttcggaggactggctgaagctgcagtaccacacggccgatgacaagtggacgtacgccgagagcttcaactcgactactgtcggtggagtcgcgaccaagtactgctggtacatccccaatgatggaaatgagggacaggagtgcacgtcctcgtcaagctcctcgtagatattttttggcaagtaagtagagcacgacaacgtttactgaagcgagcttgtttaggaagcggtcgttttgatgcatatacaatgtgatgaacactgtaaagacgatctgcttcatgtatttttccggtacatgtacccgcgtgaatcttagatcggcgtgagccagtagctcaatacacctcaacaacattaaaaaaaaatatcacgtagtatatccgcatgaatcgtgttccgtatgcattgcgttgttggataagaggttgtaatgcaaacgacgtttatatggtacctgtattaataatatatattattacacagggaattcccagattaaaaattaatccaattcagtttgcacttcaactcctgataccgtctgcggccctttgaaccaccacctagagcaagggtaattagactacatgtattctaagagttaaggcgagctttgcatgcgcaagatgcgatcccaaagaaccgacccaagacgttgacgttgtaaatggattttcagccatctccccttcccatgtggaggtgtccgcgctgcaatagacccggtacagtactgcagtgtagtgtttgcatcacagagccccgtggcatcgtaacttggactttggatttggtaggaatcgcgagccgggccgatctgtcgtcggtaaagagctccgaacagccgaaacttactttcattatggagagtgcccaatggatcactgcgttgatggtcggaggtgcaagctcgatcatccgcgggtgaataaggtacagtagatggtatattgcgtttggtatcaattgcgaatttgcagcggcttacccaggacaagcagcgatgggaatccctagaaaggctgtgatcatcatcgccgtggtggtcgtactggccgtcatcggtgtgatcatcggggtggtggtgagcagcggctcatccagctccgcttccaccgcggatggcacgtccgccagttcatccggttcagggagcaccagtacgacagacagctccagcggggccagcacgtccaccaagaagtcgagcaagagcaccagcaccagcagcgggtcgtcgactatcacgtccgacccgaccagcgtcacgtattcgcttgcagctttcgccatcggggactggggcaccatcgttacgcaggactcgtgctgcacgcgatcctcaacgtacaacgactacgacgtcaacgccgaggacatcgtggccaacctcatggaccagcaagcggggagcgccgacgtggcccccaagatcatcattagtcacggtgacaatttctactggacgggaattaacagtgacgatggccgggacactcggttcacgacgacgttcgaggagaagtacgacggtgacaacatcaagaccattccgtgggtgaacgtcctgggcaaccacgactacggaggcaccgactacatttgctcagactcgaacgacggtacggccgcctgctccgactcggacgagctggtcaccgccttgaagaacaagttctcgtggcagtccacctacacgagtcccaacgacaaccgctggatcttggaggaccacttctacgtctacaccattgaggacgcggactctggagttagcatcgacatcttcaacgtggattcgggtgatgtcgatacccacggagcgatgcaaacctgctgccaatgctacggatacgtcggagacgatgacgacacttgtgacaacgtatcacgcggcgacgacggatgctgcgggggcgacacggatctttacgatgcctgtatggaccagttcaccgaatggagcgacgactctcgcaagcagctcgctgccaacatcgcaaactccacggccacgtggaaggtggtcaatagtcattacaacccgtacgctcactatgccgagtctggaatgcagacgtggtttgacatcatcaacggcaccgacgtccacctctggttgaatagacacactcacggcgagaaccacgactactctgcgtcgctcggagtgcacttcgtcgacaacggtgcgggcggtggcatccagaaggagtctgcgagtggcattccgacgtacgcttcggactacgtggagaacctgtggagctacaccggcgacgagtacggtttcttctccatcaccgcgtcggaggaatggctcaagttgcagtaccacacggcggacgactcgtggtcctacgccgagagcttcaactcgaccactgtcggaggcgtggccaccaagcactgctggtacgtgccgaacgacggcacggagggccaggactgcacttcctcctcttcgtcgtagataatttgccgctcgacgaccgagtagccgtaattccgtgaaaagtgagacttttggtttgtagcttacaccaaacttcgttcttttcatcctggagcgcgagcgcgagcgtggccagctgtcaaggcgtagcgtagagacacgaaccccgttcaaagcccacggcaccgactatccatccgtagtggggtcgttgcagctttgctggaattcccgatggcgtgcgcagctctcagtctgttgatcgttttgctgtgaggactccacgatggaggctggctacagagctacatttgcagcattcgataggcgcgttgtggtgttcgcggtgcagttttgaaaactaaaaaacaaaattaatggatcccaccctcgtctaatcgcgttcgaacatcaagcaccattccaccaatcaaaacacactttgacgtttcagcggcgaatcacaagaccggaaagaaaactacacccccaaaccggaccagagcagggtgtgtgccgggcggtacccagctggccagttcacagcggcgcacacgtctcatttgagctttcgcggcggacctcggacccccccctcaagacacttcgatcctcgcgggcggagtactgtactcttactgtagagcagcgaaatggtcaccaagaaggcggcgatcaccggcgtggtggtgattctggccgtcatcggcgtcatcgtcggcgtgctggtcgcgcgcaagtccagcgactcggccagcgagtcctcaggcacgaccagctccggctcgggctcggtgagcggcgcgagcggcagcgggggcacgacatcgagcaccgtggactcgtcctcgtccaagtcgggcaccacctacaagctcaagaactccacgagctcggcctccagctccgtcacctcggaccccacggatggtgagccactccgttacctaattgagacggtgccggagatcgagactaacacacggatttgttatggttatttttctctatgacacagctaaattcaccctctcggccttcgctatcggagactggggtaccaccgtcacgcaggactcgtgctgcacccgctcgtcgacgtacaacgactacgatgtgaacgccgaggacatcgtggccaacctcatggaccagcaggccagcgctgcgtcggcaccgcccaagtgtgttctcagtcacggcgacaacttctactggacgggcattgacagcgaggacggccgtgactcgcgcttcacgtccacctttgagggcaagtacactggtgacaacatcaagagtgtgccgtgggtgaacgtgctgggcaaccacgactacggtggcgccagttacatttgctcggacggcgagaacccggccgagtgctcggacgccaaggcggtcgtggaggccctgaagaacaagttctcgtggcagtcgacctacacgagtccgaacgacaaccgctggatcctgaaggaccacttctacgtgtactccatcgaggacaaggactcgggcgtgagcattgacatctttaacgtggactcgggtgacgccagtacccacgctgcccagcagacctgctgccagtgctacggctacgctgaaggcagcgacaagaagtgcaagaacgtcgcgcgtggtgataagctctgctgcggaggcgatacaggtaggatatgctgctgttcgcctgaagtcgatgccatcttttcctaacggcttttaccacattctgtagagatgtatgatgcctgtttcgacaagttcacggaatggagcgatgactcgcgcaagcagctcgcgaaggaggtggcagcctccaaggcgacctggaagatcgtcaacagccactacaacccgtacgctcactacgacgaggccggcatgaagaagtggtttgagattctcaaggactcgggcattcagctctggatgaacggccacacgcacggcgagaatcacgactactcgtccacgtacaaggttcacttcgtggacaatggagccggtggtggcatccagaaggagtcggccagcggtattcccgagtacgcttcggctgacgttgaggcggtgtgggcctacggcggtcaggagtacggcttcatgtctgtggaggcgtccgaggagtggctgaagctgcagtaccacacggccgacgactcgtggtcgttcgcggagagcttcaaggccacgacgaagggtggcgtggcgacgaagcactgctggtacatcccggtcgacggtggaactggcaaggagtgctaagtgtcctacaacgtacaagaacgaataaatgaatggctaaatgacccgttttgatactcattcccagcatttctcctctggaactgtcctaacttgagttttcggtgcgtcctatgacctcgctatcagttgcgtcgttctatggcactgtagatggggtggattttgctgactgagatgatagacgcacgctacacgttcagtcgctgaagatctagcgcaattcaagcccacaacaccaatgcgctttgtccattctgcatggctggagggtacagtacagtgtacaccaactacacgatagggcagcgagtttttcgtggcttcgctggaagtcaattcagatgtgggggaggttgcctcgtttggcatgtttcagcagcacgtgagcagatccaagctccaagaggacgttaattaacaagtaaatctcatttttgacagctcgacgagcgcacgtttgcactcccactgacaattaatcacgcaaagagccggaagtcaaacgcgagggatcggcctcaagcacggggcagggccgtggtgcttcgtgacagcaagggccaccccctcatttgcgcttttgccgaggagaggaggcactagagctcctgtcggtagggcaggacagacagcaagagaccatgatgtccaagaaggcccagctcacctgcgtggtggtgatcctcgccatcatcggcgccatcgtcggtgtaatggtcgcccgccaagccagtcattcgaccagcgcatcgtcggggacttccagctccggctccgggtccagcgtgactgacagcagcggggactcaaccactaccggttcgtccagcgggacgagttcagtgtccaagaagaagaagacgaagaccagcagcagctcgacctcgggctccgatgagatcacgtccgacccaacttccggtgaacacttgttaaatcgtgtttacagtgttaaccatgacgactaacggataacgtgtgccatccagccaagtacacgttgtctgcctttgctatcggtgactggggtaccaccaccacgcaggactcgtgctgcagccgttcgtcgacgtataacgactacgacgtcaatgctgaggacattgtggctagcttgatggaccaacaggccagcgctgcgtcggcaccgcccaagtgcgtgctcagccacggcgacaacttctactggacgggtattgacagcgaaggcagccgggactcgcgcttcgagaccactttcgaggacaaatacagcggcgataacatcaaaagcgtgccgtgggtgaacgtgctgggcaaccacgactacggtggtgccagttacatctgctcggacgacgaaggccgtgccaagtgctcctccgcggacgagctggtcaaggcgctcaacaacaagttctcgtggcagcaagagtacaccagtcccaacgacaaccgctgggtgctcaaggaccacttctacgtgtactccatcgaggacgaggactcgggcgtcagtatcgacattttcaacgtggacgcgggagatgccggcacccacgctgcccagcagacctgctgccagtgctacggctacgctgaaggcagcgacaagaagtgtaagaacgtcgcgcgtggtgataagctctgctgcggaggcgatacaggtaggatatgctgctgttcgcctgaagtcgatgccatcttttcctaacggcttttaccacattctgtagagatgtatgatgcctgtttcgacaagttcacggaatggagcgatgactcgcgcaagcagctcgcgaaggaggtggcagcctccaaggcgacctggaagatcgtcaacagccactacaacccgtacgctcactacgacgaggccggcatgaagaagtggtttgagattctcaaggactcgggcattcagctctggatgaacggccacacgcacggagagaaccacgactactcgtccacgtacaaggttcacttcgtggacaacggagctggtggtggtatccagaaggagtcggccagcggtatcccggagtacgcgtcgagcgatgtggaatccgtgtggacgtacggtggtcatgagtacggcttcatgtctgtggaggcgtccgaggagtggctgaagctgcagtaccacacggccgacgactcgtggtcgtttgaggagagcttcaagtctaccaccaagggcggcgtggcgacgaagcactgctggtacatcccggttaacggaggtgaaggcaaggaatgttaagcttactgtagtagtcgtctggtattttgctgtttggaaatctctcgcggtccgcgagtcgcccaatggctgtggcttcgttttggccccactctaaactgactaaaccccatgaatccttcttgtgtaaatttgtatagctggaatgcatgacctcaacgcgctcggccgggggctatgccccccggccgaccgcgcctttaacttctttcgtgtcttttgcacggcaacttcgccattttttaaaaggcgctacggacttaaatgcaatgaatgcttcataggagtccaggagctaactaagcttacacgtgaaatcttacaaaaggaggaagataccttccattccatcatcgctgccacaactgcggaagagcgcaaaacagttcatgggcagttcagttcagcctaggtcacatgctcaaatcttcggatggtttccccgcctggaaaaatgcatcaaggtaatcaatcaatcacacctgacacggtgtaattacacggtgtagttatgcagtccttcaatgaggtacaaacatgtatcacagagggcaaccaatagttcatttaaagtcttaagttgtggcttgaaaatgagcagggttgcgaaagactacatgtagccccgggatctggtgggcgggttgcaagaaaatgttctgcggggtgcgtaggtacgctgctgctacacattccattataaattattagtcgaaacgagttctctctttgtccaggcattatttgcgtccgtggcgctgatagttagtacttggtagcacttggacacgaagcccgcgtatggtttcatctgcactcctgctcacactctacattaagaaggtgttatcatcgccactaatggcgtttccctcggtagctgcatggcttaccttacttcttctatagctttatggaagctgcaaatgccaatgcagtgctcccttgacccgctgcttgggggggcgatagcgcgtatatagccggtttttggatgactgtgccgcgcatatcgaccatagtgccgatgcttagcgctgtaaaaaggtgattcagtgtgttgagctggtatggttacgacgcgctgagcctggcattgggcggagggtgatcgtattcgcctgcacacagtgtatgtacaaagattttgccctggcgtaggctcttagcctgtacgactgcctcacagttgatgttagcagcaacacactagcttgcgctcgagtatcgtgcatcgtacggcgacttcatggcggcagtgttgttgatggttgttgctcaaaagtcgcgcttgacagcatgccacttctgtgacgtgctgccgtaccggattgctgtaacttgacccctgagcgagcccgtgttgtctgctcggctgagtgctgcgacccacgtagcatgtgcattactttaatacttgtgatggctttacgagtgaagtgctgttgaccgattcattgagcctgtactcaaacggtatacagagcgaacacgtcgtgtgtaccgtgttggtgcagttgcaggtgttcgcagccgatcgaagggctgactaaagtacacggtgtttgtaccgtgtcgatgcggttattgcagacaaatcggctgagcctgtactcaagcgttgtactgggcttaccatgacctgaacctgaactgaactgcccctgaactgataaaaacgctaccacaactgcagtatatctaatcgttagattgggtcaatgtcaatacttggacgcgcgagagggattttttagcatattgggaccaaaggtggtcaccccgaggaaactattccgattcgaggtcagtcatagggggaaaaccgttggggtctgtaccttaaaacgcttcggggttagagctcagcctaaactggacagcacgttgaaacttaaaagtcccctatctctccaaaaaaaacctcaagacttctttttaactgggctgacaggtcggaaacctgtgatttcggcgaatttaactcttcaataagaggaacatcgtcgttgagaccgacatggatagaaagccctgcatctagtttgggtaatgccgctgtatgaagcgctaaatgtatgtagatctcgagcgatttatcctcaaagctggcgttgcctggcgcctctgcgatgtttcttaccgttattaatgcagcatgtaaaaagctatatgtatttgtgtgacctttcaggtaggggttaacgatcgcgcatcgctagcgataagatgactgacaaatagtaaggggggctacgcaccatgtcctcgttgccgagcggggcaagaaaaggagaagccacgttggcattactcctttgatgaacatattagtagatatgtaaagtttcagcatccctagactcgccaggaaaaaccgaatttattcttttcccgagattcccgtacattagtggttgtcagactagtaggagcattagccaatgacaggatgcgaactttgactacgtttccaagctcgctggatccaatcagtcaaagggttaggcgacctttcgcctaaccaatcaggtgaccctcgcctcattcaaaaagatgccaactcgtactcgctgggggcccgtgctttagcgcagttcgcactgcagcactagatggtcgctgccccccccccccccccacttgctgtaatctgcctccgtggatagccaatccaggaagacctgcagagatgacttgccgtcggtgaccgcatcgtggtcttagaagaccggcttcttcttggtcttcgcgcttagttcgcttgccgcgacgagatcttcttttgtgtgtcgcacactccttggactcctagtaatctcctggaaagaaaaagctggggtaagatctcttgtaatgcaggggaattttgtccaataagatgatgagattcttcttggaaagcggcttgcatccaactctgacaaccgttgaagggacgtccagttaatccaaaaaatcacggagtgagcttctttttgaagacgcctactatttcaatactgtacacgcccgggatatgtactacgatataatgagatttgcgacaacataatcccgtgtaacctccttggcctgatcttcatgccacgcgctaaatagcttgcagcagcgagacaatacagggcgctatttggggacaacacaaagcggtcaagcaagtgagaggcaacccagtagcgagtgtgaatcaccagcagcaactcagtttgcaatttgccctcccagcaacaacccccaaccaaccaaccaagccttcaccaccgctcaagcatgcgtctttacgcgtctcgctttgccccacttctggtacttcttgctatcggcgccgctgaagcttcaacgtgcaagacgctgcttgattccgacagcacgctggccaagtccctttcgtcctggaccgaaacagacttgacttcaatcgacttcaaaacagtcttcaaggagaccgacacggccttaccctggctgtccaagtgcgccgcagccatcgaccccaaggccgtctacacgtcgctcgccagctcctccgcagtgaaaaacagtatctccgccatcgaaaacttcgacaaagatctcagcacggcgagcgggtggtcgagcatgtgtaccatggccgatggcaccatcaagccggatgtcgagaccgtcatgaaggacataatcatggacgcgtttgatagcacaggcgggtgctgcgacgacttccttagcgaagtcaagacgctgttcggcggggacgcgctcgacgacatggtgaccaaactcatagagctcggtctcaacattcaatgcagcgagaggacgttcacgaacctgaaaggcacttcgacgaaggaaacgtgcgcgtactccatctggaactccttctccttcatcgagacggacgaagatgccgacaagctcttgaacctcgcccaaatcccgaacgaccagatgtgcagcgtgttcgccggcaaggagttcaccaacaccaatggcgacaccgccacgattgacttcggtaccaacggtgtggacaccatgggcatctgtctcgagcccatcgacacgatgacgcagtacctcaagtcttggagcatcttctcggagaccatcgacgcggacggcacgagcgtgtcgctctcggacctcttcacctcaggcaagtccgtcagcgccaccctattgctggattatgccgcctcatcgtcgggcttgccgcgcatgagtctccgagccaccgagcaggtgcttttcgctctgggtgtggccaccaccgacgacggcgacagcgacaccttcctccaggacatgttcgtggagatgctggacagcatccgtacgtacttagagtcggtgctggtccacatcccgaacaacggcggctgcaccttctcggaccagtcgatcacgctgccgtattcggaagctgcagctgcggtgagtacgggcaccagtgcagcctcgtcggtcaagctgtcgggccttgtgactgcgagcgcggtgctggtctcgtcggtcttggctactctgctgttttaatccggcagatagttcaagcacatttgcaagacggccaagcaccagcctcaaacactattaaataatgcataaccatatcttcatatgagttgcatcttgaatcttgaatcaacctcgatcagaataacagcgacaacataccaatcaacacaaaacttcaccttatcatcaaaatccagcatgcattacacgtgcaacattaccgcagccagccagccactgcagcaaagaagacaccacctcccttcctcctcttactcctcgctcggctgcgcaggctcctccgtcgtcgtggcagcaggctgctggttctcctcggtcgtctcctcctcgcccctgtccgcgtcgtcctcccgattgcggaacctcgggttctcctcctgctgctgcttgtcgccctcctccccacgcggggactcggggcgtctctggcgactggagggtggctcgtccgccgccatgctgtcgtcgcgcgggcgcttgacgtgcgccgagcggcggaagtggtggccgtcggccgtggcgtcgtccccgcggccgtagccgccgcgcccggcgtcgtagtcgtccttggagcggcggtcgtcgcgcacctggccgcccgagagcccgcggccgaactggcggccctcgcggaagccaccgtccatctcgcagcgcaccacgcggttgtccagcttggtctcgctcaggaactgcgcgcaggcctcggcctcggcgtgcgtgctgtactcgacgaagcagaagccgcacggggtcttcttgaagcggtccaggcccatgatgacgcgcttgacgtgccccacgcggctgaacagctcgtagatctgcgcctcggacgtgaagaacgacaggttgccgatgtacagcgtgctggagcgcgccatggcgcgctgctgctcggcgaacgagctgaaggtcttgcggtcccagtactgccgctgcgacggcccgcgcgccagccgctgctcctcgtccgccacctccgcgtacagctccgccatgagggtctctgttggtactatacctttcgagcaattgagcaatggtcgaggacggatgagaaagagtggattttagatggagatatgatagaaggtaggtgattggtgtggaaaacaaaatatggattatgtgtctgataacacgtatttaggatctgcaggatggcttaggctgacaggcctaggacgacgacgagttgcggcaccagcagcagcaatagcgggattgccgtctgcggggcgccggacttggaggcggggatggcgtcggacgcagcgttgcacgagctgatggcgctggagagcacggtgcgcaggttgtagctctccacctcgcaggacgggacgctggagaccatgctggttaggtaggccaggcacgcgctgtcatcgcagtaggccctcgaggtgctcgagagggtgtcgctgccgcatacggccgtcacattgccactgagcgtcgagagctccgccacctgcgcggacgtgcactcggctgcatcgatgacggcgacgaggagggacgaagtcgcggccaatagcacaaagcagcacaggatgcttgacgcgagacgaggaagtaggagcggcatcgatggagaaatttgtcacgatttggtgtgcgcgcgctctagtctgatgtgaaaatggcggaattccagtgaggtcggatggggactgactgtgattacttgatcaaaagtcgaatgtatccacaatcgtccgctaggatggatcaaaggtgttggatagttttacacagtacaggacattctaacagcacaaaagtttctacagtgctgcactcctgagcagaagcagtagactcgcagtttgcaatgccaaagccaacatatcggctccagaacgcgcgtgtggggcgctgttactgctgccgctggagcttgaagtggctgtgatttgagcagcaagagtggcaaaaattccgctgcgaagttcgctgtccgacacggtgcgggaggctttttcgagcgccgggaaaacgtacgacgagatctgtcggacgcactggtccctctgccctcggcatagtgagcacacctgcgcgtaggaatgccgccggcagccgaactgggcgttgtagcaaacctccgcgttctcgtagcagggagggttgctatctcgcagagcatccaggtcggtgggcagcttctgcatgtggttcgtcttctcgtccgctagctcgttatacagcgcgatcatctgcctcgtgcgagcgaagttcgcctccagagacgatgggtcctcccagaacgggatgctggtcacgttgctcagtccgagggtcttgtcctggtcgtacgagtggaactcgacgttgccagccttgcagaacgcgttgtagttcttgtagtacttggtcgaggccttctggacgctgtcaatcgccgacgcctccgatccagaacccgaagttgaactctccactgaagatgtactggtagcattgatcgccgtgatccccaccaattgatcgatcgacaaatagcccaaaatcttgtacgagaacgtgcaattcactccatccggctgccacccaaaggggcacagtcctcccttgtgctgctctcgacagacgtcgctcttgccgttcgtccaactcgacgtcacgcagctattcgggtacgagaaccacaccgtgtcgtggtacggggccaccatatctgcagagaacgcctgtgcccccacacacgggccgatgtcgggctgaccgtcgagtccgttaaattgcttgcactctggcgggtggtctctgctcgatccactgctgtcactagccaagccgtcgtcctgcgcgtcagcataggcgcactctccgtcctgcatcaccacaaaggggcagaactccgggtacatgcagcgctgctcctggtactcggccaatgcagcgttgggctgcacgatctgcacctcgaggaacgtgatgacgctcacgttgttccttcggtggcagccgctggccgtcgggtccgctccctgatcgatgcagtcgcgctgcaggtacatgagcgcgccctctacgctggaggtggtgatcgagtccattgaggctcggtagcgctcgtcgaaggagaagttcccgctggatgggaggcccgacacgaaaacctgctggtcagcgtcccacacgggcgcgtacgtctccacgcgcgcctggtacgacgtcaccgtgcgcatcgaccacgcgtcgacgccatgcagagcgcagctcagcagcaacggcagcgacagccgcgcccacttcatggcgagactcggaatgccggagtgtaatgaatgacctgctgagcttatccgaatatcaacagccggtttcagagccgttattgagactcgccattttgaagactccttattacgggtattgatgctggtccacgtaagtaacggattttcccgaatacaagacctgtaggaaatagaagtccggtcagaaataggttggagtgcctgaaaatagaagtcccgaataaaataaaagaccggacatctattttttataaaggtactcgaacatttagcttttaaatgttagcccaaactctgtttgctttggagctcgcgctcattccaaccctattggatttacttcacaacgatacgatgtacctggaaaaagcaatgaattgtggtcgtcaaccgatctcgctacatgtactccatcagcattgttgtcttagacaaagatctgcatgtaaactactaaagaggatgaaactaaacgactgttaatctctttcgtgacgagcaatgaacgcctacttgcacttttgcagcgtcttgcacagcctagaacttaacgaagtgaacgaagtgtttgggcctcacacctacccttgccccaaacacttcgttcaaaaccattttaagttgctgctgctacaagtgcagggcaaacggatagcgggagtggttaaactcccacggcttatgtactcgaggggctgcgtcttacccaaaagcttatcaatgtgagcttgagtgtacctccaggcaccctgatttagcgaccctactaagactgataaacttcttggcaccttgacttggccagcttctcagtcgtaaatggggatggcgtcaattctttcagacgaaccaatgcggtgatcttttggtccttccaacgagcgagacgctcctttgcgagttcgtagagaatttaaccaagaaaagtacatgtagatcttccttagtgcagagccagccttgatgcaacgcttccatgaaataaaagtcctcacccggctaatattcggtaaaatccgttacttcaatctgagcattgggaatgaagggaatatacgattgccgggagccgttatcttctctgtcactgacctacatatacggcggtcttagtactcactactgggggaacgcggctccgctcggcttcttctggtttcagccttggtgacgaggccaagggtcattcatggtcatgggatttacgatgagcactcctcgcccttcgtgccgtccgcggggatgtaccagcagtgcttggtctcgacaccgccgacggtcgtggcgctcatgctcgagccgaacgaccacgtgtcgtcggccgtgtggtactgcagcttgagccagtcctccgaggccgtgagcgagaagaagccgtactcgtcgcccgtgtacgtccacacgttgctgacgtagtcggcggcgtacgtcgtgatgccgctggccgactccttctggataccgccgccggcgccgttctccacgaagtgcacgcccagcgtctccgagtagtcgtgcttctcgccgtgcgtgtggccgtagacccacgcgtggatgccagagccctccaggatgtcaaaccactccttcatgcccgtctccgcgtagtggacgctcggcgagtagtgcgagttcacaatcttccaggtcgcgttggacgtctggaccttctcggcgagctgcgagcgcgagtcgtcactccactccgtgaacttggcgaagcaggtgtcgtacatgtccgtatcacctccgcagcagtactcgtctccacgcgcaacgttgttgcacgagtcgtcgtcgccgttcgagtagccgtagcactggcagcacacctgctgggccgcgtgcacgtcggcgtcgcccgagtccacgttgaagatgtcaatgctgacgcccgagtcggcgtcctcgatagtgtacacgtagaagtggtccttgagcacccagcggtcgtcgttggggctcgtgtactcctgctgccacttgaacttgttctctagagccgtgatgaggtcgtccgtgctgccgcacttggcgttgtcatcgccgtccgagcagatgtaactagcgccaccgtagtcgtggttgcccagcacgttgatgaacgggattccagcgaggttgtcgccgtcgaacttgccctcgaaggtggtggtgaagcgcgagtcgcggccgtcctcgctgttgatgcccgtccagtagaagttgtcgccgtggctcaggatggccttcggcttgacgtcggcgttgcccgcctgcgtgttcatgagactggacaccacatcctccgccaccacgtcgtagttgttgtacgtctccgagcgcgtgcagcacgagtccttggtcacggtcgtgccccagtctccgatggcaaaggccgcaagcgagtaggtcactgcaagaaatcagagaaaatccgtcatcagcctcctcaactcctctgccatttggggggttggattgaaccgtaccggaggtggggtcggacgtcacggtggacgtgaccgtggagctgcccgaggtcgagttggacgacttcttgctggtggacgagctggtgcccgagccgctggacgtcgagtcgccggcgtcgcccgactcctccgaggacgtggaggatgagctggacttggtggccaccagcacgcccacgatggcgcccaccacggcgcacagtaccacgacgcccacgatgatcaggcgcttgttcaccgccattttcctatgtatctgactgactgtcggcgcttccaagagatctccttgtccactcgacgcgaagttggcgaatgggtgcccatggcattgacccacggaaccagattcccgatccttggaaattacgtgacaaggacggaaaggttgataaattgcgtgaaatagccttgaattgaccaaggctattgtactccgaacagatcctccggacagagaatggacgggtttcgacaaaaatggctcaagatcatctgatttttttgccagctgcgccgattggctgaattatttgcaagacgtagcctaccctaaccaggcgattaaaacgtgtcgcacacaccatggaaaagaccgatcagcaaaaatgaggtcggtggctctggggccctgggttgtccacgccgctatccagcaagcgaagctggtgaaaggcgtcgctgcagtgcgaaatgctggtatgaaaggtggaaaattgcaattcgactgccgctaatagcgatgacacggcagtcctgcacgttaatctgcgatcccacaggatgctggaggaatcgcccaacacatggtggccgcgcttcaagtccactacagtattgcggtgcaagtctcgcatggcatcgacaacaccgaaataatgtgatactgcatcggtactttcgcacggatatatccgatccacttcagttcccctccgcacgtcgagtcctttgcgactacctcgaaccggaaccgatttcagtccctaaaggtgaccacttttggctcaaaaaggcaacgacgctctctcgcgcatggctgcttggctgcttggtgccagccatcttcgcgtgcgaatccaaccataagggttggagagactatatttctggcagtgacgatggtggtgtctcttcctccaacgtggtggtggggggggggggctcagcaactctgtgtagctgaagttacaagcgtgttgctggggtcactgtacagttcctttatgcatgtattaaataaatacatgtaacaaatgcttcactgcctcaagtccgaacggctttgtatccgaatacctcgaaagcagtgcagagctatggaactgcccatcgcgctgtatttgtatttatacttgcggcttgattatttgagcactctttagaattacttttgttccgctgggtgctgaaggcctagattaaagcagcacactcacgaggagcgacgaggccagcaccgcactcgcagtcattacacccgacagcttgaccgacgaggccgcactggtgccagtgctcaccgaagatgcagcttccgcgtacggcagcgtgatcgactggtccgagaaggtgcagctgccgttgttcgggacgtgcagcagcagcgctttggcgtatgagttcatgccgtccaggatctccacgaatccgtcctgaaggaaggtctcactgtcaccgtcgtcggtggagacggcgcccagtgcgaagagcaccttttcggtggctcgtagtcccatccgcggcaggcccaactctgaggcggcataatccaacagcaagttgccacggatcgacttgcccgaggtgaagaggtcggagagcgacacgctcgtaccgtcggcgtcgacggcctccgagaagatcccccaagacttgaagtactgcatcgccgtgtcaatgggctcgaggcagatgcccatggcgtccgcaccgttagtgccgaagccgatcgtggtcgaggcgcccttggtgttggtgaaggccttgccggcgaacgcgtcgcatatctggtcgttggggatttgggcgaggttcaacagcgagacagtatcgtcgtccgtctcgatgaaagtgaaggacttgtagatggagtagccgcagacttctttggtcgacgtgcctttcaggttcgtgtacgtcctctcgctgcattcggtgttgagaccaagctccagaagcttcgtcaccatgtcgtcgagcgcgtccccaccgaacagcgtcttaacttcgctcaggaagtcgtcgcagcagccgtccacactgttgagggcgtccatgacgacgtccttcataacggtctcgacatccggcttgatggtgccatcgaacaaggtgcagatgcttgaccaaccgtccgcagtgctgagatctccgccaaagttctcgagaacggagagactgttcttcacggcggaggagctggcgagtgacgtgtagacggccttggggtcgatggcggcgatgcacttggacagccaaggaagggccgtgtcgatctccttgaagacggtggggaagtcgattgaagtcaagtctgtttcggtccaggacgaaagggacttggccagcgtgctgtcggaatcaagcagcgtcttgcacgatgaagcttcagctaccccatgtgtggcgaggaggtacgccatcaggggcgtgaaccgagacgcgtagagacgcatgcctgtggggcgctggaagttttggttggctggttgagggtgggaaggcaattgcaaactgaccattctgctttgccaggtagcttcgcactcttcatcagcccacgcacaatgctatcagtaccgcccaggtgctcctaaattagcattatgggctgtgtcccaagctatttagctgtggcaaggcataaagatcagaaccagaggtgtgtcccaagctatttagctgtggcatggcataaagatcagaaccagaggtggcacggggatatgtagtctttgatctccaatcttagatctcaaattcataggacagcagctggtccaactggtttgcgggctttggcccgcggtgttcgcagttcggtcgctttttttactgtatcccaaaacctgtagaggtagaaaactttatttactactacacctttgcccagccttagttgtctaatccgcatccaaagttttcagcttttatttgcgaggtacccgaataaggggtaccactctnnnnnnnnnnnnnnnnnnnnnnnnnnnnnnnnnnnnnnnnnnnnnnnnnnnnnnnnnnnnnnnnnnnnnnnnnnnnnnnnnnnnnnnnnnnnnnnnnnnncgaacagcgtcttaacttcgctcaggaagtcgtcgcagcagccgtccacactgttgagggcgtccatgacgacgtccttcataacggtctcgacatccggcttgatggtgccatcgaacaaggtgcagatgcttgaccaaccgtccgcagtgctgagatctccgccaaagttctcgagaacggagagactgttcttcacggcggaggagctggcgagtgacgtgtagacggccttggggtcgatggcggcgatgcacttggacagccaaggaagggccgtgtcgatctccttgaagacggtggggaagtcgattgaagtcaagtctgtttcggtccaggacgaaagggacttggccagcgtgctgtcggaatcaagcagcgtcttgcacgatgaagcttcagctaccccatgtgtggcgaggaggtacgccatcaggggcgtgaaccgagacgcgtagagacgcatgcctgtggggcgctggaagttttggttggctggttgagggtgggaaggcaattgcaaactgaccattctgctttgccaggtagcttcgcactcttcatcagcccacgcacaatgctatcagtaccgcccaggtgctcctaaattagcattatgggctgtgtcccaagctatttagctgtggcaaggcataaagatcagaaccagaggtgtgtcccaagctatttagctgtggcatggcataaagatcagaaccagaggtggcacggggatatgtagtctttgatctccaatcttagatctcaaattcataggacagcagctggtccaactggtttgcgggctttggcccgcggtgttcgcagctcggtcgctttttttactgtatcccaaaacctgtagaggtagaaaactttatttactactacacctttgcccagcctacttcacgtcaggttcttgtcagttccgacaacttggattggggattagacgacttcgcttgcactaaggagagtggtaccccttaattcgggtacctcgcaaaataaaagctgaaaactttggatgcggattagacaactaaggctgggcaaaggtgtagtagtaaataaagttttctacctctacaggttttgggatacagtaaaaaaagcgaccgagctgcgaacaccgcgggccaaagcccgcaaaccagttggaccagctgctgtcctatgaatttgagatctaagattggagatcaaagactacatatccccgtgccacctctggttctgatctttatgccatgccacagctaaatagcttgggacacacctctggttctgatctttatgccttgccacagctaaatagcttgggacacagcccataatgctaatttaggagcacctgggcggtactgatagcattgtgcgtgggctgatgaagagtgcgaagctacctggcaaagcagaatggtcagtttgcaattgccttcccaccctcaaccagccaaccaaaacttccagcgccccacaggcatgcgtctctacgcgtctcggttcacgcccctgatggcgtacctcctcgccacacatggggtagctgaagcttcatcgtgcaagacgctgcttgattccgacagcacgctggccaagtccctttcgtcctggaccgaaacagacttgacttcaatcgacttccccaccgtcttcaaggagatcgacacggcccttccttggctgtccaagtgcatcgccgccatcgaccccaaggccgtctacacgtcactcgccagctcctccgccgtgaagaacagtctctccgttctcgagaactttggcggagatctcagcactgcggacggttggtcaagcatctgcaccttgttcgatggcaccatcaagccggatgtcgagaccgttatgaaggacgtcgtcatggacgccctcaacagtgtggacggctgctgcgacgacttcctgagcgaagttaagacgctgttcggtggggacgcgctcgacgacatggtgacgaagcttctggagcttggtctcaacaccgaatgcagcgagaggacgtacacgaacctgaaaggcacgtcgaccaaagaagtctgcggctactccatctacaagtccttcactttcatcgagacggacgacgatactgtctcgctgttgaacctcgcccaaatccccaacgaccagatatgcgacgcgttcgccggcaaggccttcaccaacaccaagggcgcctcgaccacgatcggcttcggcactaacggtgcggacgccatgggcatctgcctcgagcccattgacacggcgatgcagtacttcaagtcttgggggatcttctcggaggccgtcgacgccgacggtacgagcgtgtcgctctccgacctcttcacctcgggcaagtcgatccgtggcaacttgctgttggattatgccgcctcagagttgggcctgccgcggatgggactacgagccaccgaaaaggtgctcttcgcactgggcgccgtctccaccgacgacggtgacagtgagaccttccttcaggacggattcgtggagatcctggacggcatgaactcatacgccaaagcgctgctgctgcacgtcccgaacaacggcagctgcaccttctcggaccagtcgatcacgctgccgtacgcggaagctgcatcttcggtgagcactggcaccagtgcggcctcgtcggtcaagctgtcgggtgtaatgactgcgagtgcggtgctggcctcgtcgctcctcgtgagtgtgctgctttaatctaggccttcagcacccagcggaacaaaagtaattctaaagagtgctcaaataatcaagccgcaagtataaatacaaatacagcgcgatgggcagttccatagctctgcactgctttcgaggtattcggatacaaagccgtccggacttgaggcagtgaagcatttgttacatgtatttatttaatacatgcataaaggaactgtacagtaggctgggcaaagatgtagtagtactatgtagtaatagctgtagaggagcggtgagtgaagaagttcttgaatttagcacatgctctaatttttgtattgtgaagtaccatgcgtccaattgctgggtcgcttacgctgctcgatctgccgtggcggatttacatgaactcacactacagatattcatgctgcatacttgcacagcttcaagctgccagactgaacttcagttcatgttgaatgtataatttgtttatttttctcgggttatcggggctatatgtccaattgtgacgtctgcaacttgattttgtagaattgctatactgacttccacgccgtttagctctcctcacttcgaaatcgactcgcaacaaacagtctgcacccactatcattaatcaatagcgataattttgtttactcaacgacggtttatcattgctgctgctgtggcatccgacatgtacatgtagatatcgtatcgtagaaatgacagtcacttgtctaaactaacttagccgatacgacgacgaccctgctcgcttgctgctccgatacggtcgattcttcgcagattacattgattgactgatcacccctctttattattgctgctgtctggttagcttatcgccgaaagcatgctctgagctcaaatgaatcggagtttgcgctgctatgctgtaatataattgctgtagaactgtcattgctgttgtttcaaatggctttttaaccgataatgcaacataaaaacttatgttgcattatctcaaacatccgcaggggcgcaaacgacagttcttagaacttgcctgaaaaggaagtgcaacgaaacgaggcacttgtgtaggagttgtacgttcattctctcagtgatatctatggattttaatctggaaggatagtactagaatattttttgaaatattctagtactacttccagattacttttagatatttattttaaaaaaatagtgagtggaaatacactgtacattgtacaggttacattgataaatacatttttatattattcaactacctatgtatgcagtgcatgaagtcaacttggaggagatgaccagcttgggaggtgcagtcattttgagaaccgtcaaggtttggcccccgccttacaaacacactgccccctccccccgccagaaattgcaagattgtctactacaatgtcaagagcacccgatattgcctaggaggtcggaatagcattctctcgtctaaggccaaggaaggagtataatgagctgtatgatcgcctacagctgataaaattgtgcgctgcacgaatccatctttcgtcccggccttcttaccgagttctcagaacgactagaacgaagaagaagagttcgatggagtgcgcgatacgagctggtttgcgctagtatagcattggaacgaaaccagattcactttaccgggtacgcattacgaaaacgggtccggtctgctaaaaattgctctccgtattgcgtaaagataggatcttatctgtaacgggctaactgcagcccgttacgtggttacacgagcagaggaagtagtaggcaaattgaactctggtattaagtgccgagacggtctcggcactcgagaccgtcccagccattaaacctatggtgggctctgattggccaccgcgcacacacggtggcgcctgtgtgacagtggcctgtcacaccaccccctactcaagattggaacatacacatatctaaactctagaaagggactgcagagcttcgcgaggcggacgtgatgctacttggcaagcgcgggccgacagcgcgcgaagtgagtgaagcagcgcagcagtgtctcggtcgtcatcaagggccggctgcagcgcgaccgcagcagcagcgtgggcttcaacggagcgatcttggtgcagcagagctatttcattcagtttgcaggtaaggtatactgtgctcattcagtactatgttgtgtgctaacgatcagacgagagagctacggaatgaaggagagatgcatggtgcgctggtcttgacgttttaacttgagggtaaattgcggaaggagaaatacgttaatgtgccaagtccttggaagtgggcacttcaacgcaggtaaaggaagcctaattcaaacgaacgatgctcgtgtcactgtcgagttgagctggttggtttggcgagagacacgaggttgggcatcttcggctaagcgattgagtattgagcaaattgacatgtaaaaaatgcagcctgcagctagacaagtcatattggtcatcttcagctaagcttggtcgattatggcgcaaattgatacgccttcagcgaggccatgacgctctcatagtgtactggagcgtccgtaagtgtttgaacgcaggtttttggtcaagaatgaacgattagtatcaacctttggtaaataatgtgtataaattttaacgggtacccgattccggcagatattaccttaaacattacaattaagaaagagagacccggtttggtacccggttttggaaagttacaagttttttgccggggccaagcacaggtcttcgacttgtgaacattttaaaattccagcagcgactctggagtactgtaacacattattgtgtaccatgtgtacacatgcacatacggtagcagctgtaccttttaattgtgacaaaatttcttgaagcaggtacatgtacatctaaggtgcatttcacgcaatctctgttgactattttggctgagccatctggcggacaatcatatgtatgtggttatcatctgaccttcaattgacacgtacgctggcgtggcatgaagcgagtccgtcgcggtggtacccaccgtgactccaccgtgggtcaggtcgccgcgaatcctggaacaccgaaggttgtccgtcgtctgaagtcgagcatcgccgctgggctgtccgttcttgcgaggctctcgttgagttaggcacgactcgccgccgcgccctctgcaagcgacgtctcgtacgccgccacgcaatcggggacatctgcgagtaggacctcgcgtggctcccagctgtcgtccatcgggccaagccatcgaaccagataccggcggtgcgagggtatctctccatcgcggcgacgagtgccgcgatccatgcgtgcgcgctgcggtgcatctcggtggtcgtcgtggttgagaatggcttcgacaatgtgacgctggttcccagcagcgtccactaggggagcaggaccgtcgcgctggaatgcagatgcccgaacctcgggctgacgctgcgatggcgcagcgtcttgatcgacttgggcatggtcatcggcgccaccgggaatggcggcgggatggtatcgtcgcagtcggccaacgtagaacgtagggtgcagccggagtgccgtatggagctgcagcgtgtaggcgtcgccgagtaccttcgtcactttaaaaggtccaataaagcgggcgcgagcttgttcgcgcccaagttcgtcaccaaacttggcgacatgcccgtcgtagagagcagtacccgatcgcccacggcgaacgtctccagatgtcgtcgccctcgtcgatcggcatattccttttgccggtccaccgccgccgcgatggtgtcgcgtacataacgcacaaccgactcacgtttctgcaggaagtcgcggacagccgcggcaggtgtcgccgcctcttgcgcgtcttgatacttgacggcccgacgtggtatcgggtcaatcagcgtgcgcgaagtccaaactgcgatgtccgaaggtgccgccctcctagcggcacgtgtgcgcgaagctcgttcggggttggcgcgtggtctctcgtgtgccgcccgcgtggcggcacgtgtgcgcactccgactgctggagcgttagagcctcgacgagtggtgacgccatgtaacaacgcggagacagcgtcgggtacggggccacgacgctcagcttggcctgggtcggggtctacagcaatgtcttcatccggaacgagtgacgcgagatcgcccgcgtcttcagcagcgcgaccagccggagtctcagagcgctccacaccaaggagcgctggaacgtgaggatggcgaccgaagttgacgaagaacggggacagcccggtcgatgcgtggacagcgttgttgagggcgaattcgaccaggggcaggaaggtgctccacgacttgaacgacgtagcgaagctgcgtagtatgtcttcaacaacacggttggcgcgctcagtttggtcgtctgtctccggatgcgacgcggaggacatgcacaaccgcgtccccagcaactgaaaaagctctcgccagaaagaagacgtaaagcgagggtcgcgatccgataggatggagaacggaagcccgtggtggcggtacaccacgtccacgaagatcgcggcggtttgcttcgccgtgatgctggcagcaacaggagcaagatggagcatcttgctgaaccgatcaacgaagacaagcacgccagtgcgcccttgagtgtctcggggaagcccgaagacgaagtccatgctgacagacgcccatgcgtctgtggcgactgggacagatcgaagcggagcctgcttggacggattcggcttcacgcgctggcacgcttcgcaggagcgtactcatttccggacccacttgtacatatgcggccagtagaagtctctggacagcgacgcgaacgtcatctcgcgtccgaggtgtccgccgctcggcgtgtcatggaactcgtggatcagccgagctcggagatcgtcgtccagaggaacgacgatgcgcgggggatcttcacagtcgacgcggtacgtgagcaacgcgccgtccagcgagtagcggtcgacgcgggagcggctgcgtggagacagcttgcgcttcgcctcggcaccagggtctcccaggaactggatcagctccaagcaggacgcgtcctccttgtacgcgtccacgatcaagtcacggagcggactggtcgctgcaacctcaacagcagcgacgtcttcggcagtgcatacggcgcattcgtcctcgttctcgtcgccaactgcgtggcgacctgactgcacgtagtcaggccgacgcgataacgcgtcggcaaggatgttggtcttgcccggcttgtagtgcacgacgaaattgtactcggagaacagggacaaccagcgcgccatgcgctgggacaagtgggggctcttcgtcgctgtcctcaacgacgcgtgatcggtgtagatcgcgaaggtctgttcgccgaggagatacacgcgaaacttgatgagggcgtagcgcatggccagcagctccttatcatggaccggataattcccttccgccggcttcagctgacgcgactggtagctgatgacccgctcgcgtccttcgtcatcgaactgcatcaaggcgcatccgatcgcgaagtcgctcgcgtcgcacacgacatggaagggcttcgagtggtctggaagcatgagcacaggcgcggtggacaagctcgacttcaccgcgtcgaaggcagcttggtgctcgggatgccacgaccacgtggcgtctgccttgaggagttgagatagcgggcggatcgtcgaagcgaagttcttcgagtaatgggaagatacgtggcgagccccagccactgccggagctgcttctggtcctgcggcgtcggccacgcgcagattgcctcgatcttctcggggtcggcgcggacaccgtccttgctgacgtagctcccgagcactgggatctcgggagcgcagaagatgcacttcttcaagttggcgtacagcttgttttccttcatcaccttgaacaccttgcgcaggtgttgtaggaggacctcaacgtccgtcatgccgtcctcggcacgactgtgaatgaagatgtcgtcgaagtagctgggcgcgaagtctcggtacggccgaagcaagttggacaccatccggttgaaggtggcgggggcgttcttgagcccctgcggcatcacgagccattcccacaacatcccgctgggcgtgctgaccgctgtcagcggcacatcgtcttcgcgcatcaagatctgatagaagccatccatcagatcaatggcactgtacttcgtgctgccggacatggtgtccagcaccatgtccttcctcgggatcggcgtttgcgcaggtatggtggcctcgttgagcttgttgaaggcgtggacgattctcagccgccggttgctttcttcacgcagaacgtcggactggagtgcggcgagagactctcgcgaacgtggccggcttgccggcgactctcgaagaaggcgtcaatggcttcgacttggtcgcgaggaagcggccactgccgcgtcacgcagtacttcgcaccgggcacgaggtcaatctcgtgtcgaacaccgcggtcgggtggaagaacggctggaaccttgtccgggaaaatctccatgaactcgcgcacgagcggagcgactgggttgccggccgcttcgagcgccggcaacgactgagctgcgtagcgggcttgacgggcgttcttcggctcggctccttttgggcgcgtcctggcgtcggaagctgggtccgacgcactggttgcgacggccgcaattgactcggcatcttcggcgacgatcatgcacacctgctcgatctcgcccttcttcaggtcacggaggaagtttttccacgagagcccaggcagccgagtgatctcggcggcgtcgcacggtggacgtgcgacttcgacgttgcgtacacgcggaggcgcctccgcgtcgtcccccaccaggactgagatcacttcagcctcagcctcaactgagtccgccgaaggcgtacgaggacggcgcgggttgcgacgtccgcgacgtcgaaccggacgtgagtgttgtccgaagctgccgatgagagcccatgctcgatcacgaccgctgaactggggcgccggggcacaacgtcggcgcctggacgcgggtcattggacacgaccgcgtcgacttcatcagggagctcccgctcgaccacacgcgggaacccatgctcgaccgcgtgtgggagaccacgctcaaccgcatcttcttcttcagggagctcccgcgagtggtcgagcgggaacccatgctcgactgcgtgtgggaggccacgctcaaccacatcttctcgctcttcaacgttggagagccgctgctcgccctgacgtggctcgaccacgtcattgtctgcttccgagaaccgctgctcgtcgggacgtgggaacccatgctcgaccacgtcagacacgtcctgaggctcctgctcaggaccgacgcaggttgcgagatcgcacaccgcacacgaagggccatcgctcgcttcgtacgcagcatgggtcatggagtcggggtccaagacggcaacatgcggtcactggttaggtgttccgcaaggaacgccaatactgcattcacatcaatgacccgggggcggactgtgccactcagccagttgatctcagactggtggcgagcgagccacgggatgccgaagccacagtcgaacgagccgctcagctcgatcaccaagaactcctcggaactgtggaactcgtcgaacgcgtacgcgaaggtcgccaagcgccgcggcgtccgccgcggcttcccatcagcgtacttcacgattatgtcgccaggcccgtcgcgaatgtccaagtccaccggtaacaccgacaagctctcggtgcgaacgaagttgttcgttgcgcccgagtccagcagcgcgcgaagagggcgcgtcgcgccgtcaacgtggaggctaagcacaatcagcctcgtgtcactgccggaggtggtggcaaagagttgtgcatgaagcacgggagggctaggaggaggttctgccaccagagaaccatcgctccttccacgaccagtagggcgccccgcacctactggttgtcgccgttttttggagcggcaacgttgctcgcgaccgtgacgttcgcctgcatcggcaccggagcgcggcaaatagccgcgcgatgtccaggtttcccacagcggtagcagcgcatcgggcggggactgcgcgttgacgaggccgttggcggccttgctgatgacgtcggcacccgacgtccaccgagctgttgaatcgcatccacctccatcggctccggctcgggcaccggagcccgagagacatcgaaagcctgcgacgccgtcacactgtagtcttcacggagcgcaacagcgaaggcctcttcgagtgtcggtggggtcttccgggtcaggtagaagcgctggtagccagcgctcatgccggagatgaagacgtggacttgggtcgccatgtctacgggatgcgtcgtgatgcacgacacaaggtgtcgtgcgcgccggatgtactcgagcatggacatgcgtccttgcttcaatgccggagcgctgaacgctttcatcttggggcggctcgaacgcgagccgcaagtccgccttcatcgatgccatggtcgggaagcaggaagcgtcggccacgagcttgccgagcgcccactccttcgccttccccgccagcttggacaggagaaagcgcgtgcgcgcgagctcggtagacagctgccgagcttcgatcgcgatgtccacctcgcagaacgagcggttcaggtgaaggcggccctcgccttcaccgctgtacgtggatacatcgagtttcacgatgtcggacttgttcttggtcagcgtgggagtcgacactcgctgacggaggtcagcgagttcacgcgccatgaactccggggcggccaggcgttgttgttcctcggttcccgccgtcagtagtgtcttgatcacagcgtcaccagacaccgctgcgaggcggtgtagcgcctcccactcgatcgccgacaggtgaggaaagctggcgtgctccagtgaagtggcagtcgtccgggacgcgtcaggcatcgacgtgtcgttcatgttcatcacgatcttgggcgttggacggattagcgaagtgctaccaggtgtaacgggctaactgcagcccgttacgtggttacacaagcagaggaagtagtaggcaaattgaactctggtattaagtgccgagacggtctcggcactcgagatcgtcccagccattaagcctatggtgggctctgattggccaccgcgcacacacggtggcgcctgcgtgacagtggcctgtcacgttatcagcataatggtataatagctgtgtgtacttcatgggatgcttcagataaggaccttgggatggtttgcacttgcttgcacttgaattcgtgctgcgaacagttcgcaacctgctgcgctagtaacaacggaccccaagacatcgcccccaatcgacaatgcgtctccgctcgcatttgcaccgactacttagtctcgcgatcaactgaagctggaacgtgcaaaacccttgctgatccctccagtgcggctctccaatcgctcgcgttgatgttgaacgttgactccacatcgattcccatcgagtcattcacggaaatccacgaagccttcccttggatgtccaagtgtttcgcagccatcgaccctttagcagtcttcgcctcgctgattcagtctactcaggggtgcctgtcgactgccgaagatatcgatctcagtcctatgaccacgcgtaaggcatcgagcgcctgtactacacttcaagagaacgtcgtcccgtgcatccagactctccctcatggctgctcttgatagcaccagcacgtgctgcgacgactttctcactcaaatcaagtcgctcttcggtgattcgctcgacgacatggtcaccatgctgcttcaactcggtaccaaggccatgtgctcgcagaggacctacacaaacgtgaaaggcgtttcaacgacggagttttgtggctacgtcgtcatcaaatcttttgaggaaatcgagtcgcaaaacgctgttgccacgatattgagcttgttccagatcccaagcaaccaaatgtgcaaggccatggaagggaaatcgttcaccaccaccgaaggcggctctgctagaattgagtttaatactgaagactacgacacaatgggcatttgcgtgcagccggtagacaacttgatccagtacatcgcgtcttggccgatcttctcgcttaccttcgatgccaacggaactgacatcacactggcgaacctgttcaagtcgggcaagtcggtccgcggtgacttgatcttgtcgtacatggcgacgctgaccaatctgccactgatcttactccgagcgctggacagtttagcgcaggagctaggtggtggaggtagttcgtacagtttggagacagcggacggatcgaacacggaaggcccgacatctcggccagtgtaggggattccggaagctggggcgactcgagcagctcgatagtggactcgttcctggaactcatcaacacactcagttacttcgccgacatgagcgtgcacatcccgaacgacggtggctgcacctacgccgaccagtctctttcggatccttcaaccggctcagcatcgtcatcaggctcctcggcgacgactacaaccgctacggatacgagcgctgcttctgcgctgaagccggcggtcatggcgggtatcggtgcggcgctcctcttgatggcacagctataggcgaatgcctcaaaccacgtgtagctgttaaagtagcctctcgaaattactttagagccctaactagcacgttaatttgataaatgctgaaatgaccaataaacgctgtacttgctgctcgctcgaatagcaccagaccttccctgcgaagccttcacgacggatgatgatggtgatatataacacgaatgatttcccactacagtacaattttcttcgtctacctgtagtaaaggccgctgtaccttggccgggcataaaaaaaagctcggggtttctaaagcccgaacaacagctgacatttacctacaacagacgtactgtgcattctcgctcggctgcaagcagaaccagaaaaatgaaacgtcactgcattaacaagacttaataccagaacacacaacaggcttgaacgcgatacgagcacacacaaacatgacctcaacatctacaggacgatgctcgcgagacacgagagcattgccagccccatgctcgaggacagagtcgacgcaccagctgcacccgacgactgggtcgacacggtagtggtcccacttggagccatcgtcactgctgtggcgacggtatcgatcgccgaaacctttctcacatcgaacggcaccgagatcgtttcacccacgaacgtgcattcgccgccgttcgggacatgcagaagcatcggaccgatgccagctaccaggcgctccaacagcacgtaaaccaagtcctgaccgccgtcacgcgaagagctcgtgtagctgccgtatccgacgtagtagtatccataaccgacatcaccgctcgagtcccgactgccgctttcggagtagttaaagtcgatgtagccaacccagccaaaacttccggaaaagttgaaggcatcaccaacactgccgtccgagccgtagcttcccgcggggtacttgtagccgttgtagtcgttgtagtcgtcgtagtaacccgacgaatctgacgagtagcgggccgaccagaattcacgcacggtactcacgtacttctccatcgtgtgctgtacgatcgcgacaaagttcttgggcgtgttgaaccagctctttagcgtcgcatagctgagcgactttcccgtagcgaacaaactcgacggcgagaaggaagttccgttggcgttccaggtctgcgcgaagagcggccacgacgccacgtatccgagcagcgcgtcgatcggctggaggcaaatacccatcgggtccgctcccttggtaccgaatccgatcgtgaactcgctgccgttggtgatcttgaaggccttgccggcaaaggcgtcacacatttcagtgttcggaagctgcagcagacccagcaggggcacgacgtcgtcttcactgtcggtgaagccgaacgccttggcgatggagtatccgcacatctccgtggttgctttgccctgcgagttcgtgaacttgcgctccgaacacgcgatgttcactgcgtactggctcagcttctccaccatagtcgtcagtgagttggagatgagcgtgtcgacttgagccaggaacgcatcgcagcagccgttggtggtggcgaacgcgtccatgacgatctcgaccatggcgttcttcacacacgggacgccggtgtctttgagcagagggcagagcgtgttccagcctccccgactcaagagaccgtcgtcgagattggcccgctcgaacttgcgtacgcaggagcgaaaactcgaagaggtttgcatcgacgcgtagactgccaccggatcgatggctgccgcgcacgtggacagccagggtgcggcattgtggaggtcggagaaaaccgcgtcaaacgggaactcggagaagtcatcttgatacgcggtggcgagagacttgaccagcgcgctgtcattgtcgagcagggtcttgcaggttttggcgtcagcgacgtgctgtgcactgaatgccaagacgatggttgggaggaggaatcggtggagctgcatgatgagcttgatcattgaggggccgaaaggccgaagtcggcgcgggcgcctgaaaaggcggtgaggtgcttgggttgtttcttcagagagtaaatttcagagtgaaagaatcctagagaggatgctgttgccgccgtcgaggacgaggaggccaacttctgcttcttcgtcgtcgtcctcgaaacatggtatcacggtatctgagcgtgcaattggcatgcagcagtcgttgaagtggtttcaagatggcgctacgtttctctttcttacaagacacaaggcattatgcactaagacctaaacttttcggcataggacactaggaagcattgtagctgcaccttgctatttatttatacaagaaaaaaaacaatgatcaaaaccatttaggatgtcaacatgggcaagtgcacgtagtccaaactggcatgagaccgaagtgtacgatcccatggtctgatgcctgggcgaaatagattgcagccagacaatacaggcaagctgctcaactattttgaggacctgtaaagcgcatgatggcgttgaatgcctccgcttgtgttgaagtgagagacaccacatcagcgagtaccaactccgacacaaactcagttttcaattcgcctccccaacaaccaaccagccagccagccagccaaaaccaagtcatgcgtctgtacgcctctcgcttccgcgccctcgtcgtcctcctcctcgccatcagctcccaccgcgccaaagcttcaacatgcaggactctgcttgattccgacagtaccctggcccagtcgcttgcatcctggaccgaaaccgacttgtcgccggtcgacttcgccaccgtcttcaaggagatcaacacagcgctaccgacactgtctatgtgcgctgccgccatcgaccccaaggcgatctacacgtcactcgtcagctcctccacggtcaattgaagacattgacgaagacctcggcacctcggagggctggtccaacttctgctccgtgctcgaagacaccatcatgccgtgtgccaagactgtcatgaccgacatcgtcatggacgcgctcaacagcgtagacgggtgctgcgacgacttcctcaacgacgtcaagacgctgttcggtgactcgctcgacgacctggcgatgaagctcgggcagctcagtgtcaacgtcaattgcagcgagaggacgttcacgaacttgaacggcgtctccaagaaggaaatgtgtggctactccaccttcaaggccttcacattcatcgaatcggaagaatctgccacgtatgtgctggacaacatgctgcagattccgaacgacgagatgtgcgacgcgtttgccggcaaggagttcaccaccacgaacgacatcaccgcatccatcggcatcggtaccaatgatatcgacagtatgggcatctgcctccagcccatcgactcgttgctgcagcacatcagctcttgggagatcttttcggagactgtggacgtaaacgacacgaccgtgctgctctcggatctcttcacctcgggcaagtccattagcggcgatctgctgttcgactacgctacgtcggagtcgggcctgtcgcggatgggcattcgagccgccgacgcggtgatctacgcgatgggcggcgttaggaacgaagacgacgaggttgagagcagcacaatcatcgaggactggttcgtggagactctgaacagcgtaaattcgtacggcgagggcctgcaggtgcacattcccaacggcggtggctgcacgtacccggaccagtcgatcactctgccgtacgcgaagatctcaacgacagcgtcatcaggatcgagttcgacggcgtcgtcgtcgggatccatgactgcgaatacgaccaccaaggcacccgaaaaaaataatactcataaaaatacatttgaatactttaattcaatgattaattttagaccctcaatttatttttgaattgcacacaattcgtatttgaattgctcagatggagttcgttgcagccaccagtgtccgccaaagagtccaccaccaaccactcgccgatctggcaccacttcaccgcaccactcgcagcggaggctccttcagaatcaaatttgctttcttcacccctcaccgcccaagcccctcgccccacgtgtccaccatggtcctcacgagcagccaaatctgctccatgcttttcactgatgtcggcaacggcttctacaagtgtacatcctgcgacaagcagtacaagaagggcaatggctacacgaacctgctgagccacctgcggcgcaaccacgacaactacgagcaagaggcccaggaggcgtcacgccgccagaacccgctgcgcctacacctcgtcagcacacggaccagggacctataccgctggctcaagtgggtcgtctgcgaccgcctcccgtttgcgttcgtagagcggcggctcacgcgcctcaacgcctccctctctctcgtgtcggaggacaccctctccaagtacatcgtgctgattttcgagctgctagagctgcgcgtcgctcgcgagcttcctgcatcgttcagcctcgttctagacgggtggaccagtggtggtcgtcactacatcgcgatatacgcggtatttggcagcgacagtaccggtattaccggtggcggcgctgacaacgagtactatgacgatctcgagtgctcatcgcgccgcttcctgctgttaacattcgctccagtagaggtcgaggaagacatgggtgcgcagagtcagtacgacctgatcgctgacacgctgtctcgctataacaagccctggagcgcggtgaagttcatggtgggagacaacggctctgtgaaccaatgcatcgaccggaaggaaggggctatccccttcattggatgtgctagccacagattcaatttggcagtgaaggacttcctcaagaccgaggacgagctcattgcgaaggtgcacgcgctgatgaccaagctccggacgatcaagggccgcgctctgcttcgccgcgtctcccatctgtcgcctcagttgaggaacgacatcaggtggtcgagcacgtacgagatggtggtgcgctatgtgaagctccagcccgccataatcaagctggtccatgaccttctggtcaagtacgaagtacagccgcgtttgcttcggcgcgccgagcacgagcgagccaaggcgttggagaaggtcctgaagaagttcgagggagtcacgaaagagctacagaggtctacgctaactttgtctggtgtgcgccgtctttttgaccagggggtgaaggagtacccagcactcaagtcacgactggccgcaatggctccgatcgtcaacaacccgcatttagaactgggcctcgtcaagcttcagcgcgaagaggcgttgatggccgcggaacggtcggcgtgtgccgagtttagatcgacgacccttgaaagggcaccagcgcgggaggacggcaacagctctatcgtcaaggcggcgttcaagaagaggaaggcaccgaggcgctcgcaatacgtggacgtcgcctacgtgccgccgacgtccaacgaatgcaagcgctttttttcggcggcgaagctggtgctcacagacgtgcggaagagtctctcccccaccatgctcaagatgctgatgtgtctgcagtacaaccgcgacttgtgggacgtcaacacggtggagaattggcagcaattaatggcaataatgcgatgattaatttttgcccgcagtttagaagtattaatctaagtattgcattgtcggtggtggtcgacgaccaccaccgactcaagcgctgcttccgcggtcaaggtggcgaccatgatgacttttggtgcggcgctcctctccgcggtggttgcactgctttaggcggatcaaccacgctcgtcaatgcgcagcggcaccaacgcagcacattatgcaagaattattagcatatctcgatgagctttaaatatatataagcatgccccggacttgtttcggaaaacgtacgagccccaccgttgaaccgcgtgattccgggagtaatactttctgttgaccacagctcgctgtcgcatgtcgaagcagctcaatgccttcgagctttcacggtagtgatggcgttcggcgttagttgaaatgagtttgagtagactgttgtgtggtcaagtcatgtgtgaacttcaagcgttagtgcggcttcaagttgcccccccctcgtctcatcgtcgatttgaggaaagcatcattcattgtgagttggtcagcgacgctggcccagcgtagcgaggtttcgagtctgctcgagggcaacgaacgtcaggtgcagtaagctcgttgcaggggattactctctcattgttttggcactccgccagcctgaccatcaaggtgacgctgcggcttttcatcacacacacctgcgtggttcgattccctctgcgccagtccatctgggggtgtgggctcgtcaacaagtctcgctatgtcgcgcggcaccgcatacaaattgctggttaccgcgccgcacgttcagttctttggccccataatcgcctctcttcaaagattgggacgtgagtgtctttggcgcgccgtggaaggagcgggtggcaccgtcaaatccatggcctgacctggcgcgagtgagcagcgatggatggaaccggaccatgtcagtctcacttcacttctcgctccagcccgacaatggagcaccgtcaagaccagctactcgctgagtcggcagccgacgacgctaccgacaaccaaagtgtcggcgatgtcgtgccggacaagctgctggcgccaaaggtttcgacctaccgcctgccgcgcttcagctcgcgccgcctcagctccaacagctcgttcggagaccacgaggtgctgccacgcaccaagagcatgttcccggagccccgcgagctcaccaagaacgacctgaccagtgccgacgcgttgatggccgacgacgtcttcaccatgaattcgacgctgtcgtcggtgatcgagaacgcgctgggccacccgatcccgggccttgaggtacgcttccgcaacctcgagctgtcggccgaggtgccgcagatcaagagcggcgagctcgaggtgccgacgctgtggacgcaagtgcagcagggtgtcggcggcctcttcggctccaagcagttcacggtcgagaagaagatcctgcgcggagtcacgggcgccttcaagccgggccgcatcacgctggtgctgggccagcccggatcgggcaagtcctcgctcatgaaggtgctggccaaccgcttccacatggacaagaacatctcgctcggcggtgacattgagtataacggcaaggagcggtccttgatgctggacatgctcccgcgcgacgtggcctacgtgaaccagatcgacgagcactatccgcgcatgacggtgcaggagacgttcgagttcgcgcaccgctgctgctcgggtaaagacctcgagccgtgggccgttgaggccctgaagaactgttcgccggagcaccacgacctcgcgttgaagctcgtgacggcgcaccacaagttcgcgcccgatctgatggtcaagaagctcggcctggacaactgcaaggacacggtcgtgggcaacgccatgctccgaggcgtgtctggaggcgaacgcaagcgcgtcacgactggtgagatgctcgtcggcaggaagcgactgcagttgttggacgagatcagcacgggccttgatagtgcggccacgtacgacatctgcaagtcgctcaaaagcgcgacccgcaacttcaacgcgactgtggtgatttcccttctgcagccgtcgcctgaggtgttcgagctgttcgacgacgtgctgctcatgaacgagggcagcatcatgttccacggcaagcgcgaggacgccgtgccctacttcgagcaaatgggcttccactgcccgccccgcaaggacgtggccgacttcctgctggatctgggcaccaacaagcagggcgcctatgtcgtgggctccaacgtgccgtaccagtcggctgagttcgccgaccgcttccgcgagtcgactattttccagaagacactgaggcgcctcgattctccggtcaaggagccgctgatcgtccccgacgtcaagccgttccgcttgtccttctttgaggacatgaccatcctgctgcgtcgtcagttgatgctgacgtcgcgtgacacgacgtacctcatgggtcgcgcggtcatgaacatcgtcatgggtctgctctacggctctacgttctggcagatggacgattccaacagccagctcatcctgggtctgctcttctcctgcgccatgttcctgtcgttgagtcaggcctctcaagtgccgacgttcatcgaggcccggttggtgttctacaagcagcgcggcgccaacttcttccgctcgagcgcgtacgtgctggccatgtcgctctcgcagatccccatggccgtagtggagaccgtcgtgttcggagccatcacctactggatgggaggctacgtggccctcgcggaccgcttcatcgtgttcctcgtcacgctcttcctgtgccaaatgtggttcaccagctacttcttcttcctgagttcggtctcgcccaacctgacggtcgcgcagcccgtcatgatggtatcggtgctgttcttcatgctgttcggaggcttcttgatcacgaaggacaacatcccggactatttgatatggatctattggctggatccgctcgcgtggtgcatccgcgcgctcagcatcaaccagtacctggcccccaagttcgacgtctgcgtctacggaggtatcgactactgctcgacgtacagtgagaccatcggcgagtacagcctcggcgtgttcagcctgccgaccgagtcgatgtggatctggtacggctggatcttcctgttcgccggctacttcgtgttcgtcttcgtctcgtacctcgtgctggagtacaagcgctacgagagcccggaaaatgtcgctgtggtggaggacgacgaagctagcgccgaccagaccgcgtactcgaagatgccggccactccgaagggggtgcacgaccatgaaaaggtcatcgagatccaggacgccgacgatgtcatgggtggggtcccaaccatcagcgtccccgtcgagcctaccgggcgcggcatctctctccccattacgttggcctttgagaacctctggtactccgtgccgatgcctggaggcaagaaggatgaggagatcgacctgctcaagggcgtgtctggattcgcccttcccggaacgatgaccgcgctcatgggctcctccggcgctggcaagtccacgctcatggacgtcatcgctggacgcaagaccggcggcaagatccaagggaagattctgcttaacggccacccggccaacgacctggccatccgccgatgcacgggctactgcgagcagatggacatccactcggactcggccacggtgcgcgaggcgctcatcttctcggccatgctgcgccaggacgccaacatctcgacggcgcagaagatggagtccgtcgaggagtgcatcgagctgctggagctcggccccatcgccgacaagatcatccgtggctcgtccacggagcaaatgaagcgcgtgaccatcggcgtggagctggcggcgcagcccagcatcatcttcatggacgaaccgacgagtggcctggacgcgcgctcggccaagctcatcatgaacggcgtgcgcaagatcgccgactcgggccgcaccatcgtgtgcacgatccaccagccgagcacggaggtgttcaacctgttcgattcgctgttgctgctgcgtcgcggcggtcgcatggtgttcttcggcgagctgggcgaggactcgaagaacctgatcagctacttcgaggccttccctggcgtgaacccgatcaagcccggatacaacccggccacgtggatgctcgagtgcattggtgctggtgttggaggtggcaaggctgctgcgaacgcggacccgtcgcagccgacggacttcgctgagcgcttcatcgtcagtgaccagaaggtgctgatggaggaggatctggaccaagaaggagtgctgcacccttcgtcgcacctgccggagctcaagttcgagacaaagcgcgcctccaacccgcgcgtgcagttccagcttctgtgtctgcgcttcttccgcatgtactggcgcacgccgacgtacaacctcacgcgcttgttcatcagtgtgctgctgggttgcgtgttcggtgtcatctaccagggcaccgactactcgacgtacactggcgccaactcgggcgtgggtctcatcttcgtcagcaccattttcctcggtctcatcagcttcaacagcgtcatgcccgtggccgccgacgagcgcgccgctttctatcgggagcgtgcaagtgagacttataatgcgctctggtacttcgttgccggcacgctggtggagatcccgtacatcttcttctcgagtctgctgttcaccatcatcttctacccgagcgtgggcttcacgggctatatcaccttcttctactactggctggtggtggccatgaacgcgctgctgttcgtgtacttcggccagctcatggtgttcgccctccccagtgtcgccgttgcgtccaccctcggagctcttttcagcggcattttcatgctgttcgccggcttcaacccacccgcgggtagtatccccacgggctacatgtgggtccactggatctcgccgccgacgtacactatcgccatgttggtgtcgttggtctttgccgactgctccgagggcagcacggacggtatcagctgcaagacgctgcagaacgcgccgcccacgatcagggacatgacgttgaaggaatacgtcgaggagacgttcgacatgaagcacagcgatatctggaggaacgccgtgatcctgctcatcctcatcgtcgtcttccgtatcctggcgctcgtgtcgctgcgctacatcaaccacctcaagcgctaggagattacctacaagcgagtaagctccgcacatttccgataatgtactacatccccaaaacttactcttaacgatgcacagtaccccccccccctcgaaatagaatgacccgagctacgctggacaacttcgggggtgatgcttcaattcgacaatgtgacgaggggggggggggtatgttgacagcaacttgaaagttcaaagttttgatgcactaacacttgaagttcattgagatccacgcaagactcacgcacaccactaactaaactcattccaactaatgcaggcacatgcatccagactaacttaccacgaaaactcaaacgtgaggcattccctgagccccgggagcgcgttgagctgctcgcgcacgtttcttctggtggcgcacgtcccccacagcgagagggccacgtccctggccgccatgcagcggtcgagcgcctcggcctcccgtagagcgcgctcttcctgcagcagctccaggtatcgctggcggatcgagaccgtcgacgacggtgcggccagctcgtcctgcgggccgatcaccaccgccgccgtgcgcttggccagtaacgtcctgacctgagcctcgagctgcatccactcgacctcgtcgtccgcgcgcttgtccttctggcgcttgcggtagcccttctcgtagccgcgctgcttgtccttgcggttctccttgcggccgatggggtccacgtcgattcttcgtctggttcgatgagcgggcttggccgttggcttgcgctttgtggggctcatgctgcgaggcgtggaggccatcgtcggcttcttgacgggggactcggcgacgacggtgacgctctcgacgttgaacgccatgcccaggtcgtcgtcgctagtgatcggcttgaggtactgcagcacgctgaacatcgcctgctgctcggcggccgacgtcgaggtggagatgaagctgtgcgtcggcttggaagtcaccggggggctggtgggggtcaccactacagggatcgacgtcataaactcggccgcggccatgtcttcgtcgtcgacgtcgatgctgatggactcgatccagacggggatcggagcttcccactccattgcaggcgtcatggccatggttgaattggaggtgagggcactgagaagtaggaggttttgacgccgctgtggcaaattcgagagtgaggagcggccgcgagggcggaccgacgcagaagctgtcgttggcggagtggtctcgatctcgactctggccgacagaaagtcggagcaggcaggcagggccctgtgcaagtcagacttcacagacgcgaaagcgtggcatggttgtttgttgctgtgcgtgtatatagcggctcgaaagagaggaagcgttccgtggccatccacagagcgcccgcgggtggtcacgtgggctgccgtagagagagagcggggcgggctgccatcctgaatggaggatctcccgtctgatatccgctcggggccatgggccggcgcctttgctccgttctgtcatgcgggtctgaatacggagcgggtgtcactggcgtgacggcgtccaggctcgaaaaatctcgagcggagtgaatggagcggagcccgcaccaccggctctcggtctatttcgcttgcttggtgttgtggctggtataagctccggagcttcggagtggagtggtggcgtcttcttcggtgcgatggagtgccggttgatggggctatgcatgttgacgaggaagggaggcatccctgttgtcgggggccacgtagcactctgcatctctaattgaagacgcggttgttaaatcgctggggtggtctaccacttttcgatgcatctatacatgcaatcacgaactcggctagtattggtaacttcgctgtgctggttgattggcgttcctatcccctcacacaacggtgcgcctcaattgtgtgttatgaaagagttggtaaagtacgagtttctactacgaacttctggaggccgaagtaccagaaaccgctgagtcgtcgatggaggatcgcgtgtaccattatctccaggttatgcattgtcgataggaaacgggatcatgatcgactggtctgcgttggtgcaactgccgttaaccggaacatgcacagcaagagccaggagttcgtcgaaaatatcggggctgtccgagctttcagaggtgtcagcgtatccccagttgccggccgatccgtcatcgctttcgctttgtagtccctccgagttgtctgcatagctccagacccagccccagctcccccagttggtcgagctgtcggggttgaagccattccagtcgcccgaattgtcggtgtcgaaggtgtctacgaactccgcactccctgcatcgtcgtctgcatacataatagcctgcaaactggcagcaactcgcaggataatggcgggcaggtttgtggatgttgtaaggtacgaaagcagcaattcaccagagatggacgtgtccggagtgaacaggtccgccaacgtgaaatcgacaccaccagcattgagcgtctccgagaaaactggccacgatgcgatgtactgcgtgagcgcatcaagtggctgcagacagatccccatggtatcagcgccaaaggagccgaatcctagtgagacgagctcccccttggtgttcgtgaagtcttggcctgcaaatgcgctgacatttggtcgtttgggatttgggcaatgttcagaagtgaaggagtctcgtagccatgctcctggttgatgaagctgtaggaattcaagatggagtagccgcatctttccttggtcaacgcgcccgccaggctcgtgaacgtcctctctgcacaagcagcattggcgagatgttgggccagtttttcgaccataatgtccagagaatcgccaaaccgagtgtggacctcgtcgaggaagtcctcgcagcagtcgcccgcgctaaagagagtgcccatgatggactccttcatcgcggcagtgatgcacggcaacacggtatcctcgacaatcgggcagacgttcgcccacccagctgcagtcgtgagatcttcgtccacgctgtccacgctttcgagggctgaaaggcagctcttgacagaggcggccagcgacacgtacgcagcgatcgggtcgaaaacagcagcgcacttggacaacgatggtagagcggcgccgagttcttcaaagacgctggcaaacgggaccgaggacgggtccgcaccggtccatgctgctagcgaggcagtgagcgtgctgctcgagtcaatcaacgccttgcatgctgcagcatctgcggcgttcacagccagcaataggctgacgacagtcggtagtggagacaaaatcttcatcggcaaagtcgcggttgctcttgggcacaccgccaacgcaatttgaaaagtgagctttgacgatcacccacgagtttaccatcaactacagcggcactggcagccactcgtgttcatattgtgcagctctagaagccagcccatgggactccattgtcaccgatgggctcactgcatgcgatccgctcatgaaacacccccagacttgaatctaccgttttggtggggcaaaagcctggcacatcccatgtgcggaaacgaaacccgagtcgtgaatagttttttgcgagcatgccagagtgtcgcccattttaggcataaaacaaaagcttatgacttgtgaacctccgggcgatgcaacttcggcccatagggtggactatcccagcgatttaacaaccgcgtcttcaattagagatgcagagtgctacgtggcccccgacaacagggatgcctcccttcctcgtcaacatgcatagccccatcaaccggcactccatcgcaccgaagaagacgccaccactccactccgaagctccggagcttataccagccacaacaccaagcaagcgaaatagaccgagagccggtggtgcgggctccgctccattcactccgctcgagatttttcgagcctggacgccgtcacgccagtgacacccgctccgtattcagacccgcatgacagaacggagcaaaggcgccggcccatggccccgagcggatatcagacgggagatcctccattcaggatggcagcccgccccgctctctctctacggcagcccacgtgaccacccgcgggcgctctgtggatggccacggaacgcttcctctctttcgagccgctatatacacgcacagcaacaaacaaccatgccacgctttcgcgtctgtgaagtctgacttgcacagggccctgcctgcctgctccgactttctgtcggccagagtcgagatcgagaccactccgccaacgaaagcttctcgggcgtcggtccgccctcgcggccgctcctcactctcgaatttgccacagcggcgtcaaaaccttggccatctgaagtgtaccgtacgcatccaatggtgaaatctaccgcacccatggaatgaacgcacgatttgaggagggccgagctcaaattcacgacattccgtaacaatagtattgctgacaatgtcagctactagccgttgacgatccctcacgcacttcatcactttcagaaagatgcgatccagcctaatcaagcgttgattaccccgcccggtcttggagctcaatgctgtccttggtctcattccccaactcgccttcagcccgtcgatcgagcaacaatggcagggccgccggagaagtccctcactgtgccgcccggccccacccccaaagccgaagtcgacaccgacgatgtcgtgccggacaagctgctggcgcccaagatgtcgacgtaccgccttcctcgcttcaactcgcgtcgcctcacccccaacagctcgttcggcgactgcgaccgactcccgcgcaccgggagcatgttccccgagcctcgccagctcaccaccgacgacctcctgagtgccgacgccttgatggccgacgacgtcttcaccatgaactccactctgtccaccgtcatcgagaacgccctgggtcgtcccattccgggcctcgaggtggcttccgcaacctcgagctgtctgcacaagtgccgcagctcaagagcggcagcctcgaagtgcccactctgtggtccaatctgcagcaagccctgagctcaaagaggctcacggtcgagaagaagatcctgcgtggagtcacaggcgtcttcaggccgggccgcatcacgctcgtgctgggccagcctggctcgggcaagtcctcgctcatgaaggtgctggccaaccgcttccacatggacaagaacatctcgctcggcggtgacattgagtataacggcaaggagcggtccttgagggagcgactaaattaggtcaaatcgcaaacttggtcaaggccaaatcttgaagatagataacggataggtcacacatttggcccttgggtcacgtgaccaaaccacttggtcacgtgaagctgctagaacaagctttagcgccccagcatcacccatgtcgttcccttcatcactacggaaaagtacaacatgccaagtagctatttctggccgttgtacctgttctaaactctggggtttttgaaaccaacatgacccaatagaaagcatgcgaacagtgggtcattgggacttctcccattacaaacacagctttcaagtcacgcgccaaccactaacgtaacccaagatggctcggcgccgaggcggtcgtggaggagcctctacgtcttccccagacccagccccatctcgttctcctggtcgtcgtgggcaatctcgatttgccccgacttcgcgtccgactcgtcgaagcagtcgcgcgacgagtgacgttcttgaaagagagctgtccgacgccatcttggcttcccaagagttacgggcaggaacacaggcgccgacgtcgcgtttaacacgccgaaacaaccacgcatcgagtgacgtccctgatagcgaggtgaccgcagccgtcgtgactcggcatggacttctgatggggattcgcgatactgaaccagacacgcctgagctggtaggcatcccacgaccagcgctatccatgccactgtccaatgtggacactcagacctcgacgagtgtgtcacgttcgcaacaagcgtccaagcctcgggacggacgtacaaaactgtatactcttttgttcgagctaacggaacttcaaacaagatatcgtatcgctgcagctcatatcgttccccctgccctgcgcagtttgcattctacgcgagtacgatggcgtttgacttcagcagcatgaatgctcatacatgccgtgttggtcctgctctccgaggagcaacggtgaacccaggcgatcacgccatagatgcttcgaacgacatcatgaaggaggtcgacaaacttgctactcaaacgactctcactcagaggcaaatatggatggctattgtggacaagttctacatgaacgatggggctccggttcgcggcgtatcggacaaaaccgtcaaaaaccgtgtgcaagaaacttggggccacgattccagtcacggccgagccagtatcatgacgaacccccgactgacctagattaaaggatcgcaccaaggcttcttccagtttcagtatgcctggcacgatgacgtcaaggcgctaaagaagccgccaaaggatgcaaatggcatcgatcagataactgcgtgggctcatcctacgcttttgaatttgctttgcttcgaaaacttgtcgtggtttatcgacggcacgtttagatgtgcccccgtcgactataagcagtgtgtcacaattatgatctatgatctttccagcaagctatttctccctgtcctgcatgcggcaactacatctatgacgagaaaatcctacgtccgactgctgcaatgtgtacaagatgctgtgggggggggcaaactggttccgaaagatgtggtgtgtgactttgagagttcactgattggagcacttcgcgagttctttcctgtcgtcaccattatcgggtgcctgtttcattttaaacaggcatgtcgtcgcaagatgaaaagcattgggctaccagttggtgaaatcaaggttgctatgtcgcgtaatgtctttgacgtcattgatcccaccaaaattgctgtgcagggaatcgcttgggtgaaggccaagatttgcagcgtgtgtgcggtgaaaggtctggagtactctcgcagcaagtggcgaacgttttggagctactttcagcggacttggttggagacatacccgccggaatactggaatgtgttcggcatgaggcgtgacatcatcagccggacgaacaacccattagagcgatttcaccgtgaactaaacaagcggtttaatgctgatccgcccatgaaaaccttcgtgacttcgctagagaaccttgctcgcgagtacgttgcgcaacggacgactgtcatctcaggcttagccaagccacctgagcgtacaggattcgtcctaccaagacagccaaagctgccagaggtgagcgacatcgtcgactcgccagccagcagcgacggtgagggtgaaattgtcgatgctgacgcggactcggaaccatacagcagcgctatgtcctcgacgggtgacgagaacgtggaacccggcgagtacattcagccggatcactccttcgagtacgacggcgagacgtagagagcctccgacacctacatcacggacgcgaccgcgcagtatgaagagggcagtgagcataacacataatacatttcattcattacgtacgtgaccaactgtaattaggtcacgtgacctaacgacgtgaccaactatgccatttgacctaatttatcggttaccggtccttgatgctggacatgctcccgcgcgacgtggcctccgtgaaccagatcgacgagcactatccgcgcatgacggttcaggagacgatcgagttcgcgcaccgctgctgcgcgggtaaggaattggagccgtgggtggtcgacgctctcaagaactgttcgccggagcaccacgacctcgcgttgaagctcgtgacggcgcaccacaagttcgcgcccgatctgatggtcaagaagctcggcctggacaactgcaaggacacggtcgtgggcaacgccatgctccgaggcgtgtctggaggcgagcgtaagcgcgtcacgacgggcgagatgctcgtcagtaagaagcgtctgcagcttctggacgagatcagtacgggcctcgacagcgccgccacttacgacatctgcaagtcgctcaagagcgcggcccgcaacttcaacgtcaccgccgtgatctcgctgcttcagccgtcgcctgaggcgttcgagctgttcgacgacgtgctgctcatgaacgagggcagcgtcatgttccacggcaagcgcgagactgtagtcccgtactttgagcaaatgggcttcaactgtccccctcgcaaggacgtcgccgacttcctgctggatctcggtaccgacaagcagaacgcgtacgtcgttggagagcctgatagtgtgccgtatcgctcagccgagttcgccgaccgcttcaagcactcgagtatcttccagaagacgctgaagcggctggactcaccggtcaaggagacgttgttcctgcaggacacgaatcccttccgtctgacgttcactgaggaggttgtggccttactacaacgggagttgatgctgaaatcccgtgacacggcgtaccttatcggccgcgctgtcatggttatcgtcatgggcctgctgtacggctcgacgttctggcagatggacgaagccaacagccagctcatcctgggtctgctgttctcgtgctcgctgttcgtctcgctgagccagtcgtcacaggtgccgacgtttatggaggcgcgtagtgtgttctgcaagcagcgcggcgccaacttcttccgctcgagctcttacgtgatctccatcgcgctatcgcagatccccatggcggcattggagacggtggtgtttggtgcgatcacgtactggatgggagggtacgtggcccgcggcgaccggttcctcgtgttcttcgtcactctgttcctgtgtcaaatgtggtatactagctacttcttcttcctgtcatcggcgtcaccgaatctgacaatggctcagccgtttatgatggtggccgtgctgttctccatgctgttcgggggcttcttgatcgccaaagacgacatgccggactatttgatatggatctattggctggatccgctcgcgtggtgcattcgggcgttgagtgtgagtgaatactcggctcctaaattcgacgtgtgtgtctacgacggcatcgactactgcaccaagtacaacgaaaccatcggggaatacagcctcagtgtcttcaatctgccgacagagtcgacgtggatttggtacggctggatctacctggtggccggctacttggtcctcatcttggcgtcgtatctcgtgttggagttcaagcgctacgaaagtcccgagaatatcgcgattgtggagaacaacgacgctggaacagacctgacagtttactcttcgatgccaccaacaccgaagaaatcaaaagacaacgaaaacgtgattcagattcacaacgtcgacgatattatgggcggcgtccccaccatcagcatcccaattgagcccacgggcagtggcgtcgccgtgcccgtgacgctggccttccacgacctatggtactcggtcccgctgcccggtggcgccaacgacgaacagatcgacctgctcaagggcgtgtccggattcgctctacccggaacgatgaccgcgctcatgggctcctccggcgctggcaagaccacgctcatggacgtcatcgccggacgcaagaccggcggcaagatccaagggaagatcctgcttaacggccacccggccaacgacctggccacccgccgatgcacgggctactgcgagcagatggacatccactcggactcggccacggtgcgcgaggcgctcatcttctcggccatgctgcgccaggacgccaacatctcgacggcgcagaagatggagtcggtcgaggagtgcatcgagctgctggagctcggccccatcgccgacaagatcatccgcggctcgtccacggagcagatgaagcgcgtgaccatcggcgtggagctggcggcgcagcccagcatcatcttcatggacgaaccgacgagtggcctggacgcgcgctcggccaagctcatcatgaacggcgtgcgcaagatcgccgactcgggccgcaccatcgtgtgcacgatccaccagccgagcacggaggtgttcaacctgttcgattcgctgttgctgctgcgtcgcggcggtcgcatggtgttcttcggcgagctgggcgaggactcgaagaacctgatcagctacttcgaggccttccctggcgtgaacccgatcaagcccggatacaacccggccacgtggatgctcgagtgtattggtgctggtgttggaggtggcaaggctgctgcgaacgcggacccgtcgcagccgacggactttgccgaccgcttcttggtgagcgaccagaaggtgctgatggaggaggacttggaccaggacggcgtgctgcgtccttcgccgcacctccccgagctcaagtttatcaacaagcgcgcctcgagcggctacgtccagttcgagctgctgtgccgccgcttcttccgcatgtactggcgcacgccgacgtacaacctcacgcgcttgatgatcagcgtggtgctggcaacggtgttcgccatcatctaccagggcaccgactactccgtgtcagcggtgccaacgccggagtgggtttggtcttcgtgagcacggtcttcctcggtctcatcagcttcaacagcgtcatgccagttgccgcggaagagcgcaccgctttctacagggaacgagcttgtgagacctactcagcgctgtggtatttcatcgctggaactttggcaggggttggaaaaaataatatcaatacaatagttacggcatttttagcacggaataatttattattgctttagggtgcccccgtacaatggaaaattgtcccaatacaatatcaacacttgcaccaataaaaaaactaagcttactacaaaaatcccgtatatatttattgccaataattgtgaaaatactgtattattggctgaccctgtattgcaatgattattactgcgactccaaaaccaaaatacaatatgatattttattttccgacctccgcttcatcctgtttggaggcttcaactcacccgctggaagtataccgactggttacaagtgggtgcattggatctcacccccgacgtacactgttgccatcctcgtgtctctggtctttgccgactgcgaagatgacagtggagacagtatcagttgccgagtggtgcaggacgccccgccaactataggggacaagacgttgaaggcgtacgtggaaggcaggttcgacatgaagcacgacgacatctggcggaacgcggcgatattgatcgtgctcatggtttgcttcctagtgctggcattgctgtcgctgcgctacatcaaccacatgaagcggtgaagtggtctgcatactgcgttagcgtgtttcaaaaattgctgggtcaaaaatatcgagaatgtcaaaaatatttcgtatgtgtcgaaattctttttgacgcaaactaaaacagatttcttttttcgacatttgaatgatgtatgaaatggagagcaaaaggtaataacagctaccggtatctgtatttctaatttttcattttaccgatgcttagcatgcctgtcctacgaactctagcttaacgcttgaggtggctgatgtagcggagggagatcagcgccagcacgcggaagaccacgatgaggatgatcaagatcatggcgtttcgccaaatgtcgccgtgcttcatgtcgaacgtctcctccacgtactccttgagcgtcatgtccccgatcgtgggcggcgcgtcctgcagcacgtcgcagcccaccttgtcgcccgagcaatcgcccagcacgagcgacaccaggatggcgatgctgtacgtcggcggcgagatccagtggacccacatgtacccggtcgggatgctgccggtgggcgggttgaagccggcgaacagcatgaagatggagctcagaagcgcgcccagcgtcgtggccaccgccacactcggcagcgcgtacaccagcagctggcccaggtacacgaacaccagcgcgttcatggagaccacgacccagtagtagaagaaggtgatgtaacccgtgaagccgacgctcgggaagaagatgacgctgaacagcaggctcgagaagaagatgtacgggatctccaccagcgtgccggcaacgaagtaccagagcgcattatagctctggctagcacgctcacgatagaaagcggtgcgctcgtcggcggccacgggcatgacgctgttgaagctgatgatgcccaggaagacggtgctcacgaagatgagaccgatgccggcgttcgctccgctgtacgtgctgtagtcggtgccctggtagatgatggcgaagacgcaggccagcaccacgctgatcatcaagcgcgtgaggttgtacgtcggcgtgcgccagtacatgcggaagaagcggcggcacagcagctcgaactggacgtagccgctcgaggcgcgcttgttgataaacttgagctcggggaggtgcggcgaaggacgcagcacgccgtcctggtccaagtcctcctccatcagcaccttctggtcgctcaccaagaagcggtcggcaaagtccgtcggctgcgacgggtccgcgttcgcagcagccttgccacctccaacaccagcaccaatacactcgagcatccacgtggccgggttgtatccgggcttgatcgggttcacgccagggaaggcctcgaagtagctgatcaggttcttcgagtcctcgcccagctcgccgaagaacaccatgcgaccgccgcgacgcagcagcaacagcgaatcgaacaggttgaacacctccgtgctcggctggtggatcgtgcacacgatggtgcggcccgagtcggcgatcttgcgcacgccgttcatgatgagcttggccgagcgcgcgtccaggccactcgtcggttcgtccatgaagatgatgctgggctgcgccgccagctccacgccgatggtcacgcgcttcatctgctccgtggacgagccgcggatgatcttgtcggcgatggggccgagctccagcagctcgatgcactcctcgaccgactccatcttctgcgccgtcgagatgttggcgtcctggcgcagcatggccgagaagatgagcgcctcgcgcaccgtggccgagtccgagtggatgtccatctgctcgcagtagcccgtgcatcggcgggtggccaggtcgttggccgggtggccgttaagcaggatcttcccttggatcttgccgccggtcttccgtccggcgatgacgtccatgagcgtggtcttgccagcgccggaggagcccatgagcgcggtcatcgttccgggtagagcgaatccggacacgcccttgagcaggtcgatctgttcgtcgttggcgccgccgggcagcggtaccgagtaccataggtcgtggaaggccagcgtcacgggcacggcgacaccacggcccgtgggctcaatcgggatgctgatggtggggacgccgccgatggcatcgttgacctcaattgcgttgtgctgctccttcggggtcgtcggcatctggttgtagaccatttggtcacgggcggcctgctcgtcctgctggacgatggccacgttctcggggctctcgtagcgcttgtactcgagcatgaagtacgaggcgaagatgaagacgaagtagcccgcgatgaagtagatccagccgtaccagatccacacggagtcggtctgcaggtcgaagacgccgaggctgtacttgcccatggtcaggttgtactgcgagcagtagtcgatgccctggtagacgcagacgtcgaacttggaggccaggtactggttgatgctcagcgaccgggtgcaccacgcgagcggatccagccaatagatccatatcaaatagtccggaatgtcgcccttggagatgaggaagccaccgaacagcatgaagaagagcacggccaccatcatgagcggctgcgcgatggtcaggttgggcgacgcggccgagaggaagaagaagaagctcgtgaaccacatctggcacaggaacagcgtggccaggaactggatgaaccggcccacgtcgtccacgtagccgccgaaccagtacgtgatggcgccgaagatgatcgtctccagcacacccagcgggatctgcgagatggacgtggccagcacgtacgcgctcgagcggaagaagttggcgccgcgctgcttgtagaacaccgaccgggcctcgatgtacgtcgacacctgcgaggcttggctcatggacaggaacatggcgcacgagaacagcagacccaggatgagctggctgttggagtcgtccatctgccagaacgtcgagccgtacagcagacccatgacgatgatcatgacggcgcggcccatgaggtacgtcgtgtcacgcagcgtgagcgtcacctcgcgagcgaacagcgtcgacaggtcctcggcgaacgtctggcggaacggcttgaggtccgcgaacaccatcgactcctgcacgggcgcgtcgagcaacttgagcgtggagtggaagatgctcgagtccttgaagcgcgccgcgaactcgtnnnnnnnnnnnnnnnnnnnnnnnnnnnnnnnnnnnnnnnnnnnnnnnnnnnnnnnnnnnnnnnnnnnnnnnnnnnnnnnnnnnnnnnnnnnnnnnnnnnntggcgttgaagttgcgcgccgcgctcttcatggacttgcagatgtcgtaggtggcggcgctgtcgaggcccgtgctgatctcgtccagcagctgcagacgcttcatgccgaacatcatctcgcccgtcgtgacgcgcttgcgctcgccgccggacacgcctcggagcatggcgttgcccacgaccgtgtccttgcagttgtccagtccgagcttcttgaccgtcaggtccggggcgaatttgtggtgcgcgttcagcacctcgacggcgtgcgcgtggtgctcgggcgagcagttcttgatggcctccatggcccagggctccatctccgtgccggcgcagcagcggtgcgcgaactcgaacgtctcctgcaccgtcatgcgcgggtagtggtcgtcgatctggttggcgtacgccacgtagcgtggcagcacgtcgaggagctcgctgcggtccttgccgttgtagctgatgtcgccgccgagcgagatgttggtgtccatgtggaagcggttgcccagcaccttcatgagcgaggacttgcccgagccgggctggcccagcacgagcgtgatgcggccggggcggaacacgccgctgacgccgcgcaggatctgcttctgcaccgtcatgttgttggagctgcagcagaggttgctgagcccttgctgcacctggttgacgagcgtcggcacttcgagctcgccgcccttgatctgcggcacctcggccgacagctcgaggttgcggaagcggacttcgaggcccgggatcgggtggcccagcgcgttctcgatgacggcggagagtgtggagttcatggtgaaaacgccgtcggccatgagcgcgtcggcgctggtgaggtcgtccttggtgagctgctgcggctccgggaacatgctcttggtgcgcggcaggcggtcgtagtcgcccatggagctgctggaactgaggcggcgcgagctgaagcggggcaggcggtaggtggcgacgtgcggcgccatctcgggcacgacatcgccgacgctctggttgtcgtctgtgtcgctgctgggcggtttgttgtagtggtgcccctccatagctgtcgaggctgtcgctcgctcggctggaggagaatttgggaatgaggaggaaggcctgccacgccggacggacgtggactcggtggcacctttgcgtcagacgcggtggccccacatggcggcgagcgagccattccccggctggataggctcatgtctattcgtcccccaagcgcccaggtcatcatcaagcgaagaccttgtgctcgaacataacccattttgcgattacggcaggccaggcggactgactcagcgcttgtatgccggccgagttcacctgtgtatcgcacacaagtgtagccgcaccatcgcaagagattgagccgaccggggctgccggggccacatttcctgctgcagttttgtcatggtacttcatgcgtagctgaattacagacgacatacttcaagctcgatccttcatgtgtagctgaagagtacggtgtttcaagaaacacaaattcgaaactgcattttcgaaaagacactttgtaccgtattcatacaaaaccgagttcgtgtttttaggcgggcccgatgctaccgactcccgaagtcgcctttgccaggccaggaccaatactttggtgcccacatagagcgccgaggctgtccaagcagcacatgtggcctcgtaccacacggccgctgccgctgctaccgttgcgttgcgagcgttgtacacactgtcgttttgctcgcgcggcagccggcctgcttatcttgattatggcaagcgtagcgtggacgaggcgggtcggcaggagggtggtaagccaaagtgtcccgctaacaaaagtgcggtaacctgcccacagtcgatatggatatgttagtggttaccctgcagttgtggcgaagcctgcgactgcaggactgtatgtgcatgtacttggtttctctgagtggtccgtcatgttaaaaactgtctgagggggtctccacttagtgcctgccatcaacacaagcggtggcatgaagaccagctcctcgactaccgaagcagcgatagctcgtccgaagtgatgaaaatccagcgatatatgtaaatcaccgaccaccgagctacggctcgactcaataaggctaagcgcatgcattcgctctgctccccggcgatgatggccggtggtgtatatcgcagagcgcgcagtaatcgtcaaaaaccacatggaattccttgaatcgtcttaaaaagcgctaagtgcaggcaccgcatggccgattgtgccggtggctcacggattttacacgtgagagtaaacctttggctggtagcgcgcaacgcaaatgcatcgcaacgctttgcgctaggagaatctatctgtggtttgaagggccgaggtgttgccgagatgcaggttgccttccgtatgagaagctggagcgttcggagagctcgcgcagaggttggcgtcatggcttgactgaaaactgtcaccgttcgctacacggtatccaatcagcccgggtggattcagcagagcaagccagcccgtttaaccgcttactccatctaatgcacaccgggaactcgactgcaaaagcgcagtttccaggcaagatacggtggcgaggggtgtaagctcggcgaagctggtcgggagctgcataccgactcggtattacctagagtgcacctcgcagagtttgaggtgtagttccttgccggtccggtacggcgcgccggtgaagatcccgtacgtcttttttgttttgttctgaatcatatccttcccgtgtgtctgcttcactgaatggggcacgttctggcatgactggctgatgtggctgttgcgaccacgttgggcaccgcgacggaggcttgaacccgccctctggcagtgtcccgactggctgcatgtaggtgcattggatctcacgccaacgtacagggctgccattctcaggccgctgatcgggtggggttctacaaatgtagatgtctaggcaacgatagcgagcagttaacataagtagaggttctcttcaccacctcgttgaccgaatgcctgttttgacatgaagcacagcggcatctggatgaacgcggcaatatgttcatggttcgcctgtacgtgctgctgttgttgtcactactgctcaacattttaaccactcgaagcggtagagcggtgcacgggtcaaagctagttgttgcacgtatgctgatgtcaaaatagaagtctctgaagcatcataaatgatttcgccaatgtcgataataggttctaatatttgacatcaaagtattgaatgtgatattctttgggtctgttccgcagcaccccagttattgcttttaagagaacccggaatacaaagaaggacaggaggaggtggaggaggaggaggaggaacaagaagaagaagaaaaaacaaagtcgtgcctgcggcccgaagaagctctgaaatttaagattaccttaatatgttcggtctcattgtagcgcatgcatattcaggtctctatagttagcagctaacgtaaatagaggatctcttcaccctggtctcattgtactgctaaatattttcaatgccattcagctgaatgcgtacaaattcgccacaagtcgtgtaggacggagctctctgctgttaggaagttcgtgtactttgcagcgctcagcagcaagtctatttatcacacgcgacttgaggaattatccgcgaatttgttcttccacgctttcagcttggcgatctgaatgacattgaagacctccttgtgctatgaactgtctccgaagactttggcattgatcgagaccgctacgatcgagtcgacaatgacgcctagcccggcaaaggcagcaacaccgacgaggtcgtacggaatgaagatgacaaccacgatctggatggggatggttcattcgacgttgacctcgaacggcgtcggtttattcgtgcctaacagagtgcctcaagtgcctaaaagtgcctaaaagattagtcattaaatactaagaattagaataatgttgaatctgtaggacactctcgcgttggctctcgcctgcggacttcgagacgggggcccgcccctctctcgcttcgctcgggtgcgccgttacgccgcgttgatgacatccgacgaaaagaggttgcggcgttggagtcccctttgctctggatgcagcgacgcaagccttcctaatgagctgtctcttcagcgacaccatcagtccgacagcgatcaattcgatgttgaagtgcatgtggggtagcatgatggcgttcgcaagtcgagatgcgaagaacacgccaggcgacagtctgaagtcgtgagtgacgacgtggttcagaacagcaggggtgaacacgttgcgcgcgggtgaagagcgtagaaagaaggagcccgtggcggccgttgccttgatgatggcgttatcgtggcactcgtagtgcctcacgaagtcgtcgaatgccgggtcacagacttctgatgagttgggctcgcgatagacttaatacaagctgagaaggacttttgtggtcagtgcttggtttagtggtcgaacgcgaaatggaaagcgagagaacaatcataatagctgtgaagtcgtactctgtccatcaaaagacgcaacatgatcgatgtattttctatcgttacattctggtcggttaatgcaaaatttcgactcaggtcgctcaaatgaagctatttggggtgttccacacaacctgccgccacaggtaacattcacctaaaatatcatcttaggaggggtattcgtcttttccgctccactgtactgcagtttgactgtcaatttgtatcaaaccctgcatatactgctagatgtcgatgaatcaagctggtcaggtatgagctacgggattaatcagaccagggattccaatcgcctaaactctgaaataaatttcagagaacaagaagaacttgacaaaagcagagagtatctaccagaaactggatggtgtagttgactttcacagaatcgcgctcaatatattttggagtgttcacccgttgagattcatttaaaggtgtggtgctgatgaacgacagctcgttagtttgttgtgaagtaacccaacttcctactccggtagtcataccgaatacttatatttgaattgtcgtgtcagtaagttatattgcagaaggttattgcaattattggtacctacggttattagcgagccctgctcatggatttattgcaggatcgagactcctaagccaaggaaagggccaagtgacctattaacgcgctgacttgacggttgcaggtccttggtaggaggtgtagctcgacgatttcgctttactcacgcaatgacaacaagttgttaagatagtgtgctttatgctgttaaatgcactgcttagtggttgacccggcactttgaagtacagggaagactgactacatcgagtaaactcacaggcaaagtaagcaaggcgactaccggtactgcagcgacaatgacgaggaaacctagccattcagtaagtacaatgaggaggagaacatcaagctaagtgcccggacaaacgagggtggaagccaaggacagcatacaactcgctgtggataaggtgtgcactgacgctaagtatgataacttagtccgacaacgatccataggcacgatgtaacgggctaactgcagcccgttacgtggttacacaagcagaggaagtagtaggcaaattgaactctgcttgattgattgacacggcgtaaccgccgtgtccacttaaacctatgctgagtgttgattggccatcgtctgagcacgaaggcgactgtgtgacgagagcccgtcacacacgaagccttttagcacagggctggaggtatcgtaaaagcaaccagctgaacctcgaattgcatacaccctactcaataatacacgtgttttacttaatttcagtgcgcctaggcgggtagcggatgaccggttaccggatactgaacgcttctcaattggcggattgctcaattcgacggactcaaacagcggaactgaggatgcatccctcgtattaatggtgacactggtgatacttagagtggagccgtgaccaacgacttcagcatgcggtacttaatttggtaggctctcaaaatgcacgagacctcaatcaacttcccgctacttttgcctagacgcaccttcaatacttaggtgtcaaatattagaacctattatcgacataggcgaaatcatttatgacgcttcagagacttcttttttgacatcagcatacgtgcaacaactagctttgacccgtgcaccgctctaccgcttcgagtggttaaaatgttgagcagtagtgacaacaacagcagcacgtacaggcgaaccatgaacatattgccgcgttcatccagatgccgctgtgcttcatgtcaaaacaggcattcggtcaacgaggtggtgaagagaacctctacttatgttaactgctcgctatcgttgcctagacatctacatttgtagaaccccacccgatcagcggcctgagaatggcagccctgtacgttggcgtgagatccaatgcacctacatgcagccagtcgggacactgccagagggcgggttcaagcctccgtcgcggtgcccaacgtggtcgcaacagccacatcagccagtcatgccagaacgtgccccattcagtgaagcagacacacgggaaggatatgattcagaacaaaacaaaaaagacgtacgggatcttcaccggcgcgccgtaccggaccggcaaggaactacacctcaaactctgcgaggtgcactctaggtaataccgagtcggtatgcagctcccgaccagcttcgccgagcttacacccctcgccaccgtatcttgcctggaaactgcgcttttgcagtcgagttcccggtgtgcattagatggagtaagcggttaaacgggctggcttgctctgctgaatccacccgggctgattggataccgtgtagcgaacggtgacagttttcagtcaagccatgacgccaacctctgcgcgagctctccgaacgctccagcttctcatacggaaggcaacctgcatctcggcaacacctcggcccttcaaaccacagatagattctcctagcgcaaagcgttgcgatgcatttgcgttgcgcgctaccagccaaaggtttactctcacgtgtaaaatccgtgagccaccggcacaatcggccatgcggtgcctgcacttagcgctttttaagacgattcaaggaattccatgtggtttttgacgattactgcgcgctctgcgatatacaccaccggccatcatcgccggggagcagagcgaatgcatgcgcttagccttattgagtcgagccgtagctcggtggtcggtgatttacatatatcgctggattttcatcacttcggacgagctatcgctgcttcggtagtcgaggagctggtcttcatgccaccgcttgtgttgatggcaggcactaagtggagaccccctcagacagtttttaacatgacggaccactcagagaaaccaagtacatgcacatacagtcctgcagtcgcaggcttcgccacaactgcagggtaaccactaacatatccatatcgactgtgggcaggttaccgcacttttgttagcgggacactttggcttaccaccctcctgccgacccgcctcgtccacgctacgcttgccataatcaagataagcaggccggctgccgcgcgagcaaaacgacagtgtgtacaacgctcgcaacgcaacggtagcagcggcagcggccgtgtggtacgaggccacatgtgctgcttggacagcctcggcgctctatgtgggcaccaaagtattggtcctggcctggcaaaggcgacttcgggagtcggtagcatcgggcccgcctaaaaacacgaactcggttttgtatgaatacggtacaaagtgtcttttcgaaaatgcagtttcgaatttgtgtttcttgaaacaccgtactcttcagctacacatgaaggatcgagcttgaagtatgtcgtctgtaattcagctacgcatgaagtaccatgacaaaactgcagcaggaaatgtggccccggcagccccggtcggctcaatctcttgcgatggtgcggctacacttgtgtgcgatacacaggtgaactcggccggcatacaagcgctgagtcagtccgcctggcctgccgtaatcgcaaaatgggttatgttcgagcacaaggtcttcgcttgatgatgacctgggcgcttgggggacgaatagacatgagcctatccagccggggaatggctcgctcgccgccatgtggggccaccgcgtctgacgcaaaggtgccaccgagtccacgtccgtccggcgtggcaggccttcctcctcattcccaaattctcctccagccgagcgagcgacagcctcgacagctatggaggggcaccactacaacaaaccgcccagcagcgacacagacgacaaccagagcgtcggcgatgtcgtgcccgagatggcgccgcacgtcgccacctaccgcctgccccgcttcagctcgcgccgcctcagttccagcagctccatgggcgactacgaccgcctgccgcgcaccaagagcatgttcccggagccgcagcagctcaccaaggacgacctcaccagcgccgacgcgctcatggccgacggcgttttcaccatgaactccacactctccgccgtcatcgagaacgcgctgggccacccgatcccgggcctcgaagtccgcttccgcaacctcgagctgtcggccgaggtgccgcagatcaagggcggcgagctcgaagtgccgacgctcgtcaaccaggtgcagcaagggctcagcaacctctgctgcagctccaacaacatgacggtgcagaagcagatcctgcgcggcgtcagcggcgtgttccgccccggccgcatcacgctcgtgctgggccagcccggctcgggcaagtcctcgctcatgaaggtgctgggcaaccgcttccacatggacaccaacatctcgctcggcggcgacatcagctacaacggcaaggaccgcagcgagctcctcgacgtgctgccacgctacgtggcgtacgccaaccagatcgacgaccactacccgcgcatgacggtgcaggagacgttcgagttcgcgcaccgctgctgcgccggcacggagatggagccctgggccatggaggccatcaagaactgctcgcccgagcaccacgcgcacgccgtcgaggtgctgaacgcgcaccacaaattcgccccggacctgacggtcaagaagctcggactggacaactgcaaggacacggtcgtgggcaacgccatgctccgaggcgtgtccggcggcgagcgcaagcgcgtcacgacgggcgagatgatgttcggcatgaagcgtctgcagctgctggacgagatcagcacgggcctcgacagcgccgccacctacgacatctgcaagtccatgaagagcgcggcgcgcaacttcaacgccaccgtcgtgatctcgctgctgcagccgtcgcccgaagtcttcgagctgttcgacgacgtgctgctcatgaacgagggcagcgtcatgttccacggcaagcgcgaggacgccgtgccctacttcgagcaaatgggcttccactgcccgccccgcaaggacgtggccgacttcctgctggacctcggcaccaacaagcaggacgcgtacatcgtcggaggatccaacagcgtgccgtaccagtcggacgagttcgcggcgcgcttcaaggactcgagcatcttccactccacgctcaagttgctcgacgcgcccgtgcaggagtcgatggtgttcgcggacctcaagccgttccgccagacgttcgccgaggacctgtcgacgctgttcgctcgcgaggtgacgctcacgctgcgtgacacgacgtacctcatgggccgcgccgtcatgatcatcgtcatgggtctgctgtacggctcgacgttctggcagatggacgactccaacagccagctcatcctgggtctgctgttctcgtgcgccatgttcctgtccatgagccaagcctcgcaggtgtcgacgtacatcgaggcccggtcggtgttctacaagcagcgcggcgccaacttcttccgctcgagcgcgtacgtgctggccacgtccatctcgcagatcccgctgggtgtgctggagacgatcatcttcggcgccatcacgtactggttcggcggctacgtggacgacgtgggccggttcatccagttcctggccacgctgttcctgtgccagatgtggttcacgagcttcttcttcttcctctcggccgcgtcgcccaacctgaccatcgcgcagccgctcatgatggtggccgtgctcttcttcatgctgttcggtggcttcctcatctccaagggcgacattccggactatttgatatggatctattggctggatccgctcgcgtggtgcacccggtcgctgagcatcaaccagtacctggcctccaagttcgacgtctgcgtctaccagggcatcgactactgctcgcagtacaacctgaccatgggcaagtacagcctcggcgtcttcgacctgcagaccgactccgtgtggatctggtacggctggatctacttcatcgcgggctacttcgtcttcatcttcgcctcgtacttcatgctcgagtacaagcgctacgagagccccgagaacgtggccatcgtccagcaggacgagcaggccgcccgtgaccaaatggtctacaaccagatgccgacgaccccgaaggagcagcacaacgcaattgaggtcaacgatgccatcggcggcgtccccaccatcagcatcccgattgagcccacgggccgtggtgtcgccgtgcccgtgacgctggccttccacgacctatggtactcggtaccgctgcccggcggcgccaacgacgaacagatcgacctgctcaagggcgtgtccggattcgctctacccggaacgatgaccgcgctcatgggctcctccggcgctggcaagaccacgctcatggacgtcatcgccggacgcaagaccggcggcaagatccaagggaagatcctgcttaacggccacccggccaacgacctggccacccgccgatgcacgggctactgcgagcagatggacatccactcggactcggccacggtgcgcgaggcgctcatcttctcggccatgctgcgccaggacgccaacatctcgacggcgcagaagatggagtcggtcgaggagtgcatcgagctgctggagctcggccccatcgccgacaagatcatccgcggctcgtccacggagcagatgaagcgcgtgaccatcggcgtggagctggcggcgcagcccagcatcatcttcatggacgaaccgacgagtggcctggacgcgcgctcggccaagctcatcatgaacggcgtgcgcaagatcgccgactcgggccgcaccatcgtgtgcacgatccaccagccgagcacggaggtgttcaacctgttcgattcgctgttgctgctgcgtcgcggcggtcgcatggtgttcttcggcgagctgggcgaggactcgaagaacctgatcagctacttcgaggccttccctggcgtgaacccgatcaagcccggatacaacccggccacgtggatgctcgagtgtattggtgctggtgttggaggtggcaaggctgctgcgaacgcggacccgtcgcagccgacggactttgccgaccgcttcttggtgagcgaccagaaggtgctgatggaggaggacttggaccaggacggcgtgctgcgtccttcgccgcacctccccgagctcaagtttatcaacaagcgcgcctcgagcggctacgtccagttcgagctgctgtgccgccgcttcttccgcatgtactggcgcacgccgacgtacaacctcacgcgcttgatgatcagcgtggtgctggcctgcgtcttcgccatcatctaccagggcaccgactacagcacgtacagcggagcgaacgccggcatcggtctcatcttcgtgagcaccgtcttcctgggcatcatcagcttcaacagcgtcatgcccgtggccgccgacgagcgcaccgctttctatcgtgagcgtgctagccagagctataatgcgctctggtacttcgttgccggcacgctggtggagatcccgtacatcttcttctcgagcctgctgttcagcgtcatcttcttcccgagcgtcggcttcacgggttacatcaccttcttctactactgggtcgtggtctccatgaacgcgctggtgttcgtgtacctgggccagctgctggtgtacgcgctgccgagtgtggcggtggccacgacgctgggcgcgcttctgagctccatcttcatgctgttcgccggcttcaacccgcccaccggcagcatcccgaccgggtacatgtgggtccactggatctcgccgccgacgtacagcatcgccatcctggtgtcgctcgtgctgggcgattgctcgggcgacaaggtgggctgcgacgtgctgcaggacgcgccgcccacgatcggggacatgacgctcaaggagtacgtggaggagacgttcgacatgaagcacggcgacatttggcgaaacgccatgatcttgatcatcctcatcgtggtcttccgcgtgctggcgctgatctccctccgctacatcagccacctcaagcgttaaggtgaagtaggtcagtcagcgcaggggttcaatgaaaattaagaaatacagatagttacctttgtaccacacaagatcctctgttcgatttggatcttgttcacagcagcggatacgattaaaaaggttgctcgaggggagttagtcccaggtcaacatttgtcctcaagactcttggggcgtttccccggtgtctagtagcaccagcagagcacaaaacgaaacttggacaagctccacagtgtaaaagaatcggcttcggcgttccatatgctggtgttgcgatctgaatcgcctcggacgaaaaagaaaatataatctgcggttcaagtcaatacataatcattttaccatttcagccaccgtgaatcgaccaggggggaggacaatattcaggactagcgtccgtctaagcattactcctcttgccattgtccacgcagggcggcttcaaatgcagcgtaattccgtgcgggtattcgaaacatcgtcagcgtccaagtcacctgagtcgcctcgttactatcacccagcgatctggagcactagctggtagagcaatacgagtaatgccatcattccaaatacgagcacgccatgcacatagcccactccactaaatctgccgctgtaaatgttgctggttgagatttcacgactcgcttgcaactgcaacagcgccggcgcaaaaaatgccacgtagatgcccatcagcccactgatttgcagcgtcactgacaggtccgaaacaaacatcgaaatgagcagcggcggcagggcggcaccaaatcggcacaagagtttccaggaagacctcctgccaccccgcgtccatcgcttgggcaacacagcggccatgttatctccaagcgtaaccgagatgagcgggaacacgctcaacgtatcgagagctgggaaaaccacaacgatcatcgacaacaattttgcccacaacggcacgagtgtcatagactcgttgattccccacgtaaactccgcccagttcaaattcacactcgtcgcaagcttcggtccaaagtaaagcgagcacacggagcccaacgcgatgtaaaacaccatggtcgtcagcagcgtgcttccgaagatcgccggcgccttctcctgattcttcgcccccagcggcgccaacaaacccggcaccgagtgttggaacaactgcgagaacacgctcgtactgaacatgacaccgaatccggagagatccacaagcgaaaagtcactgacgtacggcgctgattcgggggcggactccagggtggcgccactgtcgtacgggtctccgtagaccgcataggcagcgctgaagatcatgatcagtagcgcagcgaagcgtacgaccgacatggtcagctggacgtagatctgctccgtgaggtcggagcacgagagcggcaccacgatgcaggcgaacacgatggccgcgtggacgctggagagctcccagtccccgatgtgatccacctgcgtcaggaacgtgttgacgaacacttggctgtagccgaccaggcctccgtacatgaggccgagcagcgagatctggtacatcttggagcctacggaacccaggaaccggtcgcagagctgcgtgacctcggggaagtcgtcgtactcgaccacagcgctgcgtctggaggaggacggcaagggcgtggagttggcggacgagtacgagtaggagaaggacttgagcgccgccgtctcgtccagcaggaagctcatgacgaaggcctctctcgcgcgcgccaccgtctcgcagacccacatgaccgtcatgtacgacagcagcgtgaccagcacgatcatgacgttgcccatgacgagccccgcgcggtagaaggcgtaggggatgcccagcgagcccacgcccaggatgtagttgaccgtgaaggcgtaggccacgtacggcgagtactgcgcggccgcctgctgctgcttggccagcggcagcgacgcctggcggtgcagcagccggtgtgcgttgcgggaggagcgcgtctcgccgtggtcctcccagttgccggcctcctcgccgctgttctcgtacacggagctccagtccatggctcgtggcggaggcgcattagcggaagtgccgtgtcaagcgaattgcggaactgaacggggcgattcgattggtgaaataacttatttatttcagccaaccaggagagtcctaaaatcaaaatcctgcgatatgattggtgaaagaatcgtttgttctaccaatggagagattttggcactgcaagttgaagtgagtcagagcagtcccggcaggatgagcgaaggcacgcgctcgcagtacttcttccagtcctggcggtacttgtgcgcgcagcgggcgtcgtcgcggtaggcgcggtcggtgagcaggacagcaaggaagatgcagtagaagtatggcgccgggctggacgccagcgccgggagcgtccagcacagggcgcccagcacctccggcacgtagtggaagtggcgcgccaacccccaccagcccgacgcgagcagcaaactctgcttcttctctcccttctccgtctcatagcgcgccacgatgaactgggccggacgcccccacacgttcgtcttgcccttggccgcgcggaagccctgacgctggcggtcagcgtcgtagttgatcccaactaagcggcagaacacaagtgagttagttcgtgtcacgaaagaccattgcagtgatgatgaggcgacgtacccatgaggacgcccgtggtgaagatggcgagcgccagcggcgttcccagactgatggggttctgcaccaggtacatggctggcgacgtgtagacggagggcacccacaccaggcagccccagcaaaggtagtacccggcgcggtcgtgcatgatgtcgatgctgcacatgtagccggcctcccaccagaaaaacttggccacgtatacgagctgcagcgccacactcacggccattgagtcgctcaggtacccgtacatctcgcgctgcttgcaggcatacgagagcacacccaccgcccagaacatgagtccacagcggcaattggtgaagagcttgacgtcccagcccagcacacgcgggtacaactcagtgccccagtagaagtcgaagacggggttgcccgacgtgccagcgtcgctcgacgactgccacaggaatgcgcccttggcgtacaggaagaggcagaagatgaagctgaagacgttgagtgccgatatgatctcgggcatgaagtcgtacacgatcccgcccggatagagctcgaacacgaaggcgccggccaggaacagcgccagactcagcgtgaagcactggaagccgttgctcttgtactcgggcacattgccgccaggggtcacgggcccgtacgacgtcttgccgggcaccgcgcgcatgagcacaagctgcgtggccatgaagctaccgatgagcttccaggccgttgggtcccacggcgttggccagatctcgtacagcgacttgccagcagcgaggaaggagccgacagagccgccgtgctccacgaagacgtgcgtgatgagtgtggcggccgggggcgtcaccgtcatgaggagcagcgggccgagcgtcttgcggcccgggaaaagacccagcgactcgccctgcttgttagaccacatcttcactctcagtggagagcaagaaccttgaagtgtgtggtgcaggaagagcagaacgcgaagtggtgcaggccgatggtgactggatcctgattgggcgtgtgattacatccaaatcggcgagcgctgtttaccagggatcgccgagggcggcgggtctcgtgctcttgtttttatggtgcgtgtcagccagactcagatgcaagcttaaggcggcgaaggtcgagatgccaaggtccgtctcacctgcactcagtgttcccgtcgatagcattctgtgccgaaaccaccgggccatatatgagcagctcaagtgtaatttggggggggggagcgcgttacaacagccccaagcaataccctccacaatgaagcgaaaccaatgaccacacagtctcatgcgggtgctgttgatcgatttggactcggctcattcttcataccgaacaccccgagggaaaccaagttcttgccgctaccgtaagctaccatcggcaaagtgaaatcgtacacttaaacatggcgcagcccgacttcacaagcgtcgatgggctgctggccggtggcatgctcgccatgcatgagagcgtggctgcagcaatcgagaacacactaggaagaccgattccagaggtagaaatcttcttccgcgacctgcacatctcagctcgtctaccagtagccaagccagggtccgaaggaccccaagtcccaacaatctggacgcagatacaacaaggcgtgatgaaatgcttctcgagccaggaaacgacagagaaggagatcctacgcggcgtcacgggggttttcaagccgactcgcatcacgctcgttctggggcagcccggttcaggcaagtcctcactgctgaagattctcagtggtcgattccccatgaacaagactatcggtgtctccggcgagatcacgtacaacggcaaaccccgagcagagctactgtcccgactgccacgattcattgcctacaccaaccagaaggatgaccactacccgcaactcacagtccaggagacgtttgagtttgctcacagatgctgcggtggcgccaatctggaaccatgggtgctcaaagctctgcaaaactgcaccggagaacaacacgaaatcgcagtcaaggtcatgacagcgcatcacaagtttgctgctgatctgcgtgtgaagtcgttggggttagaccgatgcaaagacacaatggtgggcaacgccatggttcgcggtgtgtctggcggcgagaggaagcgtgtcaccacgggtgagatgacattcggccggaaacgagcaatgcttctggatgaaatcagcacgggactggatgcagccacgacgtacgacattgtgaactcgctcaagagcttaacgcggcacttcaaggccaacatcgtggtgtctctgttgcagccaccaccagaggtcttcaatctcttcgacgacattctgatcatgaacgaaggccgcatcatgtatcatggtccccgtgaggaagtgcagccgtatttcgaacaaatgggtttccactgcccaccgcgcaaggatgtggccgactttttgctggatctgggaacggataagcagcatgcctacatcagcgacacaaacaccgcggcaaccgtcccctttgaggcggttgactttgcagagcgcttccgtcagtcggatattttccaagacacgttgacgtacatgaggacgcgctccaaccacaaatcggacctctttgatccgctcgaggacccgtgtgtgttccgacaatcgtttcttgaagatctagggacagttctacgccgtcaatggagaatcaaactccgtgacagaaccttcatcatcggcagaggcttcatggtgctgatcatggggctactttacggctccgtgttttggcagatgaatgatgccaacagccagcttatcctcggacttctcttttcgtgcacaatgttcctctccatgggccaagctgcgcagttgccgacatttatggaggcccgaagcgtattttacaaacagcgcggagccaacttcttccgatcgctggcctacgtgatggcttcatcgctcacgcagatccccttcgccatcttcgagaccgtgctgtttggctcactcgtgtactggatgggaggttacgttgccctcggagaccgcttcatctccttcctggtcacgcttttcttgtgccaaatgtggttcacggccttctttttcttcctctcggccgctgctccgagcatcacgatcgcccagccagtgatgatggtctccattttatttttcgtattgtttggcggatttctcctgaggaagcccgacatccccgactattttatctggttctactgggtcgatgccgtcgcgtggagcatccgctcattgagcgtgaaccagtacttggcccccaaattcgacgtgtgtgtctacggtggcattgattattgcagtcacttcgggaccacattcggcaagtacagcctcaagctctccggactgccgacggaaggaatgtggatttacttgggctggctgtactttgtcgtcgggtatcttgcgcttgtgttcggagcccacctcgtacttgaatacaaacgttacgagagcccggagagcacaactgtagtgcaagctgatctcgacgccaaggaaggaccagcggacgccaagataaacacgagcaaggtcgcccctgcccccgaagagcacgtcactgttcctataatgactccaaggacaagagctccgcccgtcacgctggcgtttcatgagctttggtactccgtgccaatgcccggcgggaagaaaggggaagacatcgacctactccaaggggtgtctggatatgccaaaccaggaaccatgacggctctcatgggatcgtccggtgcaggcaagacgacgttgatggacgttatcgctggtaggaagaccggaggcaaaattcggggcaagatcgtgctcaacgggtatcctgcgaacgatctcgccattcgtcgatgcacggggtattgcgagcaaatggacatccactcggaatcggcaacgattcgggaggctctcgtgttctcagccatgttgcgtcagaacgcgagcattccgttgaaggaaaaaatggagtcggtggacgagtgtatcaatttgctggagctggggcccatcgctgacaagatcatccgcgggtcatccacggagcaaatgaagcgtcttactatcggcgtggaactcgttgcgcagcctagtatcatcttcatggacgaacccaccagtggtctggacgcacgttcggccaagctcatcatgaatggtgtgcgcaagatcgccaactctggaagaaccattgtgtgtaccattcaccagcccagttctgaagtgtttagcttcttcgactcgcttctgctgcttcgccgaggaggtcgcatggtattctttggggaactcggtaaggaatccagcaacctcatcaactacttcgaggcagctccgggtgtgaagccgatcgagcctggatacaacccggcgacgtggatgttggagtgcattggggctggtgttggcggtgggtctggcaacggcatggattttgccgagtatttctcaactagtgatctcaagacgctgatggacaaggatctggataaagatggcgtccttcgtccgtcttcggatctacccgagctgaaattcagcaagcagtttgcttctacccccatgatgcagttcgacatgctgtgtcgccgattcttccacatgtactggcgaacgccgacgtacaacctgacgcgcctgatgatcagcgtcatgttgggggccattctcggcttcatctaccaagcaactgactacgccacgtttaccggggccaatgctggtgcggggcttgtgttcatcagcaccgtgttcttgggcatcatcggcttcaacagcgtgatgcctgtagttgccgatgaacgcaccgcattctatcgtgaacgcgcaagcgagagttatcatgcgctctggtacttcatcgccggcacgctggttgagatcccgtacgttatgctatctgcgctctgcttctcgatcatcttttacccgagcgtgggctttaccgggttctcgacatttatccactactggctggtggtatcactcaacgcgctgctcttcgtatacttgggccaattgctggtgtatgcactgcccagcgtagctgtcgcgacaattgctggtgcgctgctgagctccatcttcatgctgttctgcggcttcaacccaccggcgaataacattccgatcggctacaagtggatctactacatttcgccgccgacgtacagcatcgcaacccttgttgctatggttttcgccgactgccccgacagcaccagcagcaatctcggttgccaagttctgaagaacgcgccacccaccgtcggcaacatcacgctgaagcagtacgtggagacggcattcaacatgaagcacgagcacatctccaggaacgtgctgattctcgtcattctcatcgcagtattccggttgcttgcgctactgtcgctgcggtacatcagccatctcaaacgctaggaaccaaataaagttgatacattgataacattcgtatagaacatgtttctccatctaccaacaaggtaactatgcccacgcagtttatttactacatagatgacagctccgttcattcttcaagacaataaactgcattgaataaatacctaactctgtgttggccactttcagcaccggagccacgggtggttcagcgcctcagtggcagtcatccgcgcagatgagtttagcaccagcacgcgttgaaggaagtcgatggccatggggctcaccccgtgccagtacctcttggggaaggtcagtttgtacagcgattggatcttctggttgggccgcagttgagttgtggctgcgaacgggagtcggccgcacagcagcaagtacgtgagcaccccgaaggaccacatgtccacggaagtgccgtacggctgccgtagtagaatttcaggggccaagtagcccccagtgcccaggaaggacgtggacgtcgcgccctcgctgagcaccttggcgaagccgaagtcgatgatcttgacgtccagtgcgccgcgccgacggcgtggtgagaccgccagcagcatgttctcgggcttgaggtcgcggtgcacgacgccacgctcgtgcatgtgctggatagccgagagcacgcagcgagccacgtgaacagcttcacgctccgaaaagcggcccttgtccacaatggcgtcaaagagctcgccgccctccagcagctccatgatcaaaatcaggtagttgtcgtcctcgaaggcctgctccagcttggcgatgtgcgggtggtccacgcgccggagcacgtcgacctctcgtcgcagctgggcggccacctccctgcgcttcctggccgacggggccagtttcctcttctcgatgatcttgcaagcgaagcgtcggccatcggtcttgcgcacgcacttgtagcacgtggaggtcgtgcccttgccggccacacactcaagcacgtactcgtcaggcagcagcgcgcggaagcccgcggcagcgcccgaagacggcgagcggcccgtgggactggcgcggcagacgcgcgcagggctggcggcgtgcgacggcgagtcggccacgaacgagctctcggacatggtggcggcctcggaggacacggagccggccaggctcttcttgggcgcgtcctggcccagctgctgcagccgcacggccgtgtgcgccagctccagcgcgtggcggtccgcgtgcgtcttcttcttcttggccagcagctccttgtcgggcgactcgaggcaggcggcggagcggcggtctgtgcggctgcgcgtgtgctgcggcagcggaggagtcgcggccgagggcggcatggtcttggccagcgtgcgcgtgcacggttgctcgtggcggcggcgcgcctcgtgatggtggtggtgcgctgtggcgtgcacttggtggtggtgacggtggtgcgtgagccggcgcggggcgtccgcgggctccccggcgaagcagctcttcatgatggcggcgcccatggctgctgacctgcgtctggactggaggagagatagggaagtgtctggcgctctccgactcgtctcttcgtcgtagagaagcggggggggcggacgatgtcagcgcggccggcaacacgcgggttgctccctgcttggctagcgagttacacactgcgcgacggcgcgaagggatccgtggcgtggggatttggtcattggcgaggaaaccgtatgggtcggttcgatagatttcgcgcgctgcggttggtcgaatatgattctgctgacccttcggattggccccaaaaggcgacaaaaatcgagcgtcgaccggtcgcggctgcagtctgactttttctcttgtttggaatggtttagatctctaagtttctctatcctagcataaatgcctctatactagcatatcctcctatcaagaactactacatacgatgattgtgtggacagatgaaaacaaacctctgaataagactgagggttgtcgtttgtcgggcccgttgatgctgggggggggggatacgctggcacggccacgagctgcagttcaaccacttccgccgtcgagctgcaagcggctgggttgggcagggcgctgcccgccatcacgccgcagagcgcggcaggtggcctggtgtcgagaaaacccttgccagtgttgaagcggcggcaccagcagtctgcgcgatcccagcattcttcatcgtggagcattcttcatcgtggagcactgcagaatgatcatgcagagcggagggttccgcgcgcaggacgagtaagtccggtgctggcgctgccgtattattagcaaggctatcccagacgttgcgagggtttcgggggttgcatgacggaccgcttcgcgaaagtgcacgttcttgccggtgatactgctgctgctcctgtagctactcagcccgcgcacagctgggcggactcattgcactggccgaaatctgcactcgcagacgacgccaagcctttatgcaccgaacgcacacttctcgttgtgcatgtacaccgagtgcatcgctcctgttgccaaagagagacactcgccagttgccgcaaacgtcagcagtgagagaaggccccaggaacttaacctggtggcgtatatttaggcacgtatttcggagcctgctggaagctggccctttgacgtctgagttgccctaaactattcctagttgatcggtttcccttcctgaggtcgtggtgaggcggcggtttgaggggatgcggttgcagaggttaagggggtgacttagggggttccaggagatgtagtgatggaggtagtcgggggtcggaaatagacttaccggtacgtggcttttgtatcggaatcgctccgggcgagactcgaaccctcagtggaacgcttgatcttcgtcggccttacccacagcgacactaggagcccccaccgcaatcgccagcagtgtctcggcggaccaaactttcgcgcacactcaagcaccagctgcgagaatgtccgtcacacagcaaagccttgcacccgagcatcgaaatcgcacgccgatgatagacaatgctgctgatggcaacacccagttttggcttacattggtgagtgcattcgcactcaaaactcggcgcacaacgcaacacaagtaagcctcgtgtcgacagggatattcactatatctattaccaaggcaccgactaatggtgccgtaaccttagtttgatacggtcttcctcggtctcatcagcttcaaaagcgtcatgccggtagccgcggaagagcgcaccgctttctacagggaacgagcttgtgagacgtactcggcgctgtggtatttcatcgctggaactttggccgagatcccgtacgtgttcttgtcgtgtctgctgctctcagggatgttaagagttcttttgttgagttttctttaatgttcttttttatttttttaaaatatattaaaatataaaaatcagacgtcgcctcagccaatgtacccaaaagggtattttcccgagaaatcgcaaaattaggttaatggaaacagaaccaacaatgacaaagtctatatcgctcgaaagaactaacttagagaaagtgatcactggtgcttcgatatccgtcggtgcagtagttgttgagaaatgtagattccttttttagcgtaaattacagaaggcatcctatcggtaagctattttgagcaatcacaagcggtagcgtccccagacgctttagctgctctctctttgcggttaaattccaaagtaccgtggtagaagtataaacccacgtcgtaagcagtgagagagtagcaggtgcagcagcagagcaccactcggaagtaggtagaattcattgggacccttcgcgcagtcgtcgacggggcaccaacggctgaatgcatgtgcgtttgagtatgatgcattttgccgtggatcatttaggatgaaggagtactggtatgatcgccagccttcgtagttaccctttttagatgcatgctagcgcattacccaagttttggatgcattgtgcaaatatcgacaaaaatgaatatatcgacttctcgagcctgttgaacattggctgaggcgaccctgtaaaaataagaagttgcaccactgccatttttattttattctggggttacaatttcacttcaaaaaaagtcgttcttttaacatccctggctgcatcatcttcttcccgagcgtcgccttcacgggctgcagcacgttcttctactactggctagtgctgtcactcaatacgttggtatctcggccagctcctggtgtacgcactgcccagtgtggttgttgctacaacgttgggcgcgttgctgagctccatcgtcatcccttttggaggcttcaacccgcctgccggaagtatcccgactggttgcaagtgggtgcattggatctcgtcaccgacgtacacggttggcatcttcgtgtcgctggtgaatgcgaagatggtagcagtggcggtgttagaaaaaaaaacttgctcgcgtagaaactcgagcttgtaggtaccgcgttatgctaccgagtgcgtcatcccgtcattcatcctaataaagtaatgaagttcgcgagtatgggtgacaacgcccggcgccgtgcacgcacgagttggccgcgagtgttagcggtgtcaaactcaaaagccccaagctttgctgccgactgccgacaagtgacgcgtacagtctaaagcaaacctatgttcctgtgctctgaaatattgtgcgttgcccgatgtcttcaatcgagtagggatcagaggctctcgaaaatgcattaccccatgaaagacctgcatcccgattttggtttccctagtgcttctggtggttgatgtagcgcagcgaggacgaatggtcccgactatacaaaaagcgggacgaactatacagccagtagctccataacatacaaacatagagagatggctctagcgttcaaccacactgaaagcaaaagtgatctacatctctcaatcaatttacggccttctcgcgcgtgcttttctttcttcacaacgataaatctgccgccctcaagaccactgaagaagcattgccgaaaacttcggcttcctttgcgtcctcgtgcacatccacgcccagccgctgaacagccaagcgaccatgctttacactcttcgtggtggtgtccgtggctcgaccgatgcgtgttgcagagggaccacggcatcatcgcgggggttacggaaccatgggtacaagcaaacccctgctgagtggactaaactatgtgtgcgtgtgggaaagtcaatgatggccatcgcacatgcccagaagggtacgatacgagcgaagagctgtagacctatcaatgtggcggcgtcaggcacgggtacggcatcgctggttcgcgctttttctcctgcccctgaccccaagtctgccgccaatacgcccgcgcgtaaccaagagcgtggcgtagtgtttgctattgtggatcgagaagaaacacaattcggaattaagtacctggttaagtggtgtgacgaagctgatgggtttcggtgggatgacacatggaagtatggtgtaggacttcgtgaggacggcttcgatcgtacgtgcaatgtggtggacgagtggaaagtgtccaaagtgtctacatactaccaattttgcaagctaaatggacattgtcaccacattggagcatcgcccgaaggcttatgtgcgttttacgcgctaggtattgcgactgagctggtgggtaacgccggttggtactccatggctcaagctagtcaatttatgagggaatgtgcaggaaggggtaaaccgatttcggccgagggggtgacgtatggtgaattgcgctgctacgtgaagtttgcgaattggaggaatctgaagcaggtgagcacgacgcttttggataaaaacgtgttcgggggtgtgaccagccaccaatcgactagtaaattgtgcgcagttgtgctcgaagaaggtgtctatatctgtgctgcttttagttcactgcgagtgacgcacccttttattattgctgttgtggatgggaagaaattcatctacgacgacgagatcactggtgttggtatcggacagtgcgatttaagctggatttctggtgtgtcgtttgtgcgccgtgtggacgtctacgttgtaacagggttacacgcacaagtggctacagtcacttgtaactctaacagacacgacgtctgttagaggttcgaaagactttctcgaccttggtgtagacacaccaaaggctacatacatttacgaccaccacgacgggtggtccatagagacttaggattcctattggctgagagcagcatctcttagccaatgagcgacatgcatagcattgaaattctgccaaccagccgttggcagattcctatcttagaatattacatttagaggaagtcagaaacataaaacaaaaatagcagttctcatttttaacccaaaaacattatttggatcgtttatttagattaatctatactcggaggcccgagtataattaactctaatttaaactaggctacgcttcctcacatacacgcgcacacgtgtaagctaaagtagtgggccaaagtaggcccattacacctggtagcactttgtagtccgtccaacgaccgactacctgagttcgtacgtcaccgcacgaacgcggagctgagaaccttcccatggatacagaggtgcccatggaaagctccactacgcctgcaactcacgttgcacgcgctgactgtccccatctgtcggatccagagtgggaggccctccaacgactgtcaacagtcattggtgaggcggctgtagctacgatgctgcgtacgctaacgccgacagagcaacacggtgttgctctggggttcatcctgaaggagcaacgcgatgttgctgctactaccgcggtgccgtccgggacgacaccacgcgcgcaatcgctgatgctcaatgtgagcaactatgtcggaagagagggtgaacctctcctccgttggtttgtcgaactcgacactgccattgcggctcgacgtatcgtcgacccgttgtcgaaggttgcgttcgccatgtcatgtcttggcggacgtgcaagaagttgggcgtatggacgccgactctcggatcctacgtgctttaacacgtacgagggtttcaaggaagagttcagacaagcatttgagccaccgcaaaacgagttccggccgagggcggagttcctcgaccttcagcagggcaagcatgatgtccatgcttacgctcagagagcacggtacttggtctcgaacatcgtgaccaatccgatcgacgaggcgaccaaggttgtcacgttcatgaaggggctgagagatgggcctgtgaagacctatctcttccgtgagtacccgagtactctcgaagctgcaattactcttgcaatgcaggaggagtttagcctgcggcaggctaagctgcatgcacatgtgccgaggccacagccacgcccggtagtgaggacggaaggcccagaacccatggacctctcgagtgctgcaactgctggaccccaacagtcgcagggaaacaatgtgcgatgctaccgttgtggtagcgttggtcactttgctcgggagtgcacggcccccgtgcaccagcagggtggctatcgcggcggtgccgggcaccgccgcaaccaaacaaaaaacgctggacgccagtaggcgcggggcgccctactggtaatgcagttccgcgtgtcgaccttggacacgcaacactgaggactgcagcccccagtgaggttcattctcactgcaagaaccaagatgacaagcctgaccttgtcattctgaatgtgaactcgatgagagcaagcgactctcttcgtgctttagtagattctggcgcgtcgaagaactttgttcgactgcgaagtctatcaaggcttgacttcgagaattgaaagatacctcgaagtatgttggaagtacgactggcaacggatgccgtcgtgaagaccgagaagcgcatggaacgcgtgcgcttcacgtatcaagatcaagagtttgtcgagacctttattgtcctggatctggacgataggtttgacgttgtattgggcatgccgtggcttgcacggaatgatccggtcatcgattgggagaagcgcactctcgtgcgcttcggtcgtgacagcggaacagtgagcgatggccctgttgccgctacgcacgcaccgacaggtgccacgcgactccccactcgagacaacgcctaatgccgctgtcccggagcgccctgggcgcgcgcgagcacacgtgcaagagcaacaagcgccggcgtcgccgccgacagctaatgaaggaaatgtgttgacctcagaggtcgacacccgcttttcagcgaatcaggaagagtctccggccgcaaggggcacggatgacgcaggcgagtcacacgcctcagccgtggaggctgacgcgaatgtgattggatcaagtctggccaataataagagccaaggtgacgtaacgccgtcgactccgggagtcgatggcttgggtgaattggattcgtcggctcggggagccgacgcaccctccgtaatggagggctccgccaataacaggcgtcgaggtgaagatggcgtgtcggctccgggagccgacactgcaggcggtgcggacggttgcaaacgtcccgcaccggaaaaacttgcatgctgtcgtgcagccgggctgcacgacgaagcgccgggcgaccaagccgggcttgaagtcgctcgcttgcgggatgaacccgccggcggtactgaagaagaacacccgtccacggctgggcctggacgaggtcaagagtcatgcggagccaggctccgcaggacaagaagacggcgcatgcgaaggtcgcagcgcaagtctcggcccggggccgaggcgctacaagaaaagtctgccgggcagacggaggctgagaagccggacgtcgagacgttgaacgtcttgacgcgtacctgtgccgggttccggtacagggagatgactctcgctaaccctccgacgcaagcgtcggagttgacttcgcttccagtcatgagctgggagcgcttcgcgcgtgacttgcacgatggacgtatcgagcagatatgcattctctcggacgccgagagaacgaagagctagaatgaagaactgaggcagttcttcatggagagcaccactgagagcgaggacactctcagtgccaagacgaagaacgagcgctttgaagagcagagctgggactcgttgaagacgagtccctactacgagatcttacgggagtacgcggacgtgcttccggaagagatccctgcggagcttccgcaggacaagggcatccagcaccagaccgatctcgtgccgggaacgaagtactgtgtcacgcggcagtggccactgccgcgagagcaggtcaaggcgatcgacgacttctttgagagtcgtcgcaaagccggacgagtgcgggaatcgaagtccccgcacagtgctccgacgttctgtgtcaagaagccacaaggcggctgtcgcatcgttcatgcgtacaacaagctgaacgatgcgacgataccggcgcagacaccgataccacgaaaagatgcaatcatcgattcgatggccaggagcactatctacagtgctcttgatctgcgcgatggattctatcatatcctcatgcgtgagagcgttatccctctcacggctgtgagcacgccgagcggcatgctctgggagtggctagtgataccgcagtgtctgcagaacgcccctgcgaccttcaacaggtgcgtgacgcacttgttgcgctcggtgcgcgacttcgcaccgagctactttgacgatgtgttcgtccacagccgggctgcggacaggatgagcgatgttgagatgcacaacctgcatctcgggaagctgcttgcgcttatgcgcaagcacaagctctatgcgaacctgaagaagtgtatcttcggagcgagcgagatacccgtgctcgggtgtctcgttggggagaacggtgtccgccctgaccctgagaaggtcagagtgatcaatgagtggccgacgccgtcgaacgtcaaggaactgcggcagttccttggcttggccacgtacttgtgcaagtacgtgaaggacaacgcgggcatgatacgcccgctgtcacagttcctgaagaaggacgccgagtgggtttggactgctgagtgtcagcaggccttcgatgcagtcaagcggggcttgactgaggcgccgatcttggcggtggccgaccaagatcgcccattccacggtgtgtgtgacgcatccgacttcgcaatcggatgtgcgttgatgcagcacgatcacgaaggtcgtgatcgtgtcgtctactatcaatcgcgtcagctgaagccagcagagcgcaactacccggtacatgacaaggagctccttgccatgaagtacgcactcgcgaagttccgagtgtatctactcggaagcaaaccgttcgtggtctatacggaccacgcgtcgtggcggacggctgtgaagtcgccgcacatctcgcaacggatggcgagatggctctcattcttcgcagagtataacttccgggttgagtacaaacccggaagacttaatgtggtggccgacgcgctctcgcgtcgacctgactacgccacgactgatgccgacgtcaatgccattgacacaatgcgatcgagcaccccgacgtcgtcactgttggacgacgtgaaggtcgcgtacgcgcacgacgcggacgcgaagctcttgctggcctacggctcagcgccttttgacaaagctcgtcagaagctgccgaagcatcttcgtgctcgtgcacaccgttaccgggtgcacggcgggttagtactctacagtgcagtcgacgacaacgcggaccgcgttgatgtgcccaatgaccatgacctgcgactcaggatcatgtatgagtatcacgatgcaccgactgcggggcatccgggccgtgagaagacataccttcttctcacgcgagacttctactgggcccaccagtataaatgggtgcgcaagtacgtccgtgcttgcgaggtttgtcaacgtgtgaagcctgcgccttttgcgcaagctcccttgcagtcattaccaactccacgggagtgttggcagtccatgtctttggacttcgtgttcggtcttcctccgaacagccaggggaacacgggcgttgtggtctttgttgaccgcttcagcacgatggtacatcttgctgcggtacccgctgaagtgactgcgaaacagacggcgcgtctgttcgttgacatggtgttcaaacaccatggcatgccgatcgacattgtgtcggatcgagacccgcgcttcactgcacacctttggcaagaagtgtttacgcttcttgggagtcaactttcgatatcgactgcggaccatccgcagacggacgggcagaccgagcgcgtgaaccgcgtactcgtagacgtgcttaagagctacgctcactcgttccaacactggagcgagtgcctgccgatggcagagttcgccatcaacaactcggtgcatgcctcgaccgggcatacaccattctacgtgaatgccatcaggcacccacgcctcccgagtctattcgggatgttggctccttccttaagtgggggaggatctacgacggcaacacagcagccgcagaatgccgctgacacttgcacagtgtcagccgcgactacgcgcgagaagaagaagaagcacgcgtctgtgcagggcacagacgccgacaagacgaacgcagaggccgggcctactgctagaaacgagctgaacgagttcagctcggacgcaatcaacttcgtgcagcgcagtcaagccgtcattcggtttgtccaagacgctatcgcagcttctgtcgaccgacagaagctgaacgcagacaatgttggcaggggcaacacaaatgaattcaaaaatggttcattggtttggttagcaactcaaaacctgcctaaacatgccgtttccgacttcggggcgagcaagctcgctccgcgcttcatcgggccgttcacggtgttggcacggcatggcaacgcctacacgctagatattccatctagcatgcgcctccatccgaccttttacgtcgggcggctgaagccataccggcagcacgagccacctagctcagctggcccgaagcggaagccccagcgggagcgaacctctgctccagcgcgtgaacgcgttgggccaagcgtgcgacgcgacctcccacgtcgacagagatgtcctacgcggtctgcgaggcctgagcgacttgagccctcaggatcgccacctcctgcttcagagcggcgaactcctggctctgatgctgctccacagcagcgacccgctcctcgagcgtcgggccatggtcaaccccaggttgaccatacccggggcgtgttcccaccaccgccgcctccgatccgcgacgcccgcggctcaacacgctggattgttgagcgtattgtgaaccatagtatcccgaaaacgaaccggcagccggttcgttatcgtattcgttggagagggtttccgccccaccaagatacatgggagccacgggacgtcctgctgcaggacgtttcggaaatggtgggggcgtacgaagctcaccacgcactgccgacgcgaaggtagtgcgagcgctatggtcacctacagcgcccgaggtcccacgatcgtcgcgttcctcaggtgccaagaacttggcacggagatccttgagactcgcaggtacatgaatcgtcgtgtacccgtttaggtcgcggtcgctcaagcgcgccgcacccggaagacacaacgtgcactgttggccttcgggcacagcgcatggaataccagcgtccacagaggatctgtggagctgctccagccgtccgcgcgtcgagaatgtctcgaagcgctcacgggcattcttaacccgctcacggtaagcagccggcttcttgttgaagttctcaacaaaagcattccaactttgacaaagtgcctgccactcaggcactttgctgcgagaagaggtcttcttgctggagaagtatcggagatcgtggaagagcccgatgtaataatcgcgcctttgattcgttaaaggatcaaagtgctgctcctccgcaacagcatcgtcgtggataccgctgcatccgtacagcgggatttcgtttggaggcacagtgttggccacacggtctgcgatctctgacgcagacggcatccacggatcgcgcgctgctcaggcagcgcgcggagagcttgaaggcgccacctcacgcggggagcttaaagccccagcagcaaagagcggagtgtcgctctcgccgcgcgaatgcttcgagctcgaagcgtccgagtcgtctccttcacgagggcgtctcgacccggcatgcaggtcgagactatcgctgtcgatagactccttgcgcttgctagaagaggcctcaccctcttccatctccacgtcgtcgttctcgaagtcaacggcgtcgttgactacagaagaactttcgaggacaatctctggttgagttgtccccgccgcagccttggtagcaagagcgtcacgctttgctttgagacgctcgcggtactcggggatagagagagtttctatctcggcggaggatcccccctgctgcagcgtcggtctacttctgaggcgagctcattgcggaatgagctcgagttttctttctcccaacgtgaagaattgacgaatggtcaatttcctgattgacgtgccgtgactcggtgcgtctaaccttgaggggggatggtgtaacagggttacacgcacaagtggctacagtcacttgtaactctaacagacacgacgtctgttagaggttcgaaagactttctcgaccttggtgtagacacaccaaaggctacatacatttacgaccaccacgacgggtggtccatagagacttaggattcctattggctgagagcagcatctcttagccaatgagcgacatgcatagcattgaaattctgccaaccagccgttggcagattcctatcttagaatattacatttagaggaagtcaaaaacataaaacaaaaatagcagttctcatttttaacccaaaaacattatttggatcgtttatttagattaatctatactcggaggcccgagtataattaactctaatttaaactaggctacgcttcctcacatacacgcgcacacgtgtaagctaaagtagtgggccaaagtaggcccattacatacgtacgctgatttactgcacgagttctgtcgagtttctcttaaattcttaacgcagtcgttctttttgcttgaacttcattcgggttattggttaacggcatctctgatggtgaggcaccttttttactggacaattcatcagaacggacgaattcgatacactcgtttagtgtgcgccacaaatacgatgctggccgatttcttcggtgctgagaaaggcctcagctcttagtattttcgtcctcatgttgcatttgctcttcaccgtactgctaccacgccacatttctctctactccggctacacgacacgatgttctggcgcagatgcgtgtgcacaacgctgtgtgggtttttgctgaaagctctggtaacggttgggctcggcattatgcacgtgaacggaaaactaagtccgaacagatcgccagaagaaagacacaaagtggcttgttgggcacggtggcaagcgactccgggatctctggtttgctcccactgttgaccaacggcagttgctgatggagcagacacccgacagttcttttgctgtggacacggatggagtttgcgacgagcgcaacccccccagagcagtgttgcctcctattcaaaggccagccaagcctcgatctaccaaggcgaacatccgctcgccgacgttcaagcgcaagggttccgcctccacctcgaaaaaggcaacgaagtcgcgagctaagaaggtgacagtaaatttgacggcggtcacacgtgaaatcacaaagtttgagaagaagctgtcgcatgtgatgtcgacgccgctgtaagaaaagctttatggcgccgatcagattctcacatggattgttggtggacgcatatccagcgggggtgtgatatgcctgccacctccagtaccgacccttgagccattgcgagtcgaaataagtcgcgaattctttcagatgcgtggcccccttccatttcggcagctcacgatctcggcacagctcaaagtccagcaaaccggtggcatagtgcatgtcaacgatagatgacatcaccatccttcttgttttgatcggtagatgctggattcgcttccgcacattgtacaacacatggaagaagcacatgagctttttagtatccgtgaacgccgaaacagactctactgtgatgtattgggcgtcttccgcgtcacccatggctgtgtccacttggacgaagaccccacgcacttcaggtataagctccacgaagctgcggaaacactcggtgtattcgtgcgctgttcgccgactgacaacgaagaaggcccccacttgataggctctggccttgtccgtaaatccacacgtcaccactgggtaccctatgtcacttaacttgaaagtggcgtctgcgtgaaactggcaattcgacccgaaatttacaaaccgcagacagccatcaatcatcgctaatgatgttatgccaataatgaaaggatcttcatccgaccccaacccaacgtatgcatacccttcgctgtctaagctcgcgccaaacaaaaaggccgtgcctgcgtttaggtccgggcggtaacagcgaatacgaacgagatcttgaacagctttgcgagagttcttcgtcccttggtctctccgaaggcgcttcaacgcgttttgcacctgcttcaggcttggccaaccacgactagccactgggatctgggattactttttcaaattgaccagcatgagccgtggtggaatacccatctcatcttgttctgcaagaaattgcttcatcatcatcgtcacgcgtgcagggtggatggtactgcatggaaccacaccacgcatgtgcccatgctcattcacccatatcgtccagatatcgctagccgtataggtaaacactttccacacaagagcacaaacccctatgtcgctgcaggtcttgcttgtacacgtaaggcgtctctcagtcattgcatgcataccccatatgcatacccccgcatacgttgcatacgtgaaagtcgcgcttaagtgtcaccgccgagcagcaaatatcatcgtctcgataggccttaaagctgtcttcggaggcgtggactgaaagccgccgccatggctccattgctggaagtttgttgtttgtgcttgtgacttcacttgtgtggggagctacgtatagtcgttggtttcaaagggattccccaaaaatacagcacaagtatgtttagatattggcaagatttatttgttcaaccatgccaaagtacgccggtcagcttgtatatcgataccccgctcgtatgttatgtacccattctacatgatatgtatgacgcagccccatctgatatggaatgcccccaagtctgtatattttgtcctaagaatctgtatatttgtacaccctcgtccgcagcgagagtagcgcgagcaggcggaaggctgcacaggatgaggacgttcctcgggatctcaccgtgcttcatgtagaagccattctccacgtactgcttgagcgtgatggtaccgacagtaggtggggcgttcctaacagagctagcaatcgggtacccgaaccgggtaaattacccacccgcatcttgccttgacgctccgcgacagcaactacgtgcccacggtggttcttcagacagcactcccttgcaccaaatgtcgtgctgatcccgtgctcactcaggcgtagtcagttgcttggtagatgaagccgagaatggcccccaacatgacgctgatcatcaggcgcgtcaggttgtacgtcggcgttcgccagtacatgtggaagaatcggcgacacagcatgtcgaactgcatcatgggggtagaagcaaactgcttgccgaatttcagctcgggtagatccgaagacggacgaaggacgccatctttatccagatccttgtccatcagcgtcttgagatcactagttgagaaatactcggcaaaatccatgccgttgccagacccaccgccaacaccagccccaatgcactccaacatccacgtcgccgggttgtatccaggctcgatcggcttcacacccggagctgcctcgaagtagttgatgaggttgctggattccttaccgagttccccaaagaataccatgcgacctcctcggcgaagcagcagaagcgagtcgaagaagctaaacacttcagaactgggctggtgaatggtacacacaatggttcttccagagttggcgatcttgcgcacaccattcatgatgagcttggccgaacgtgcgtccagaccactggtgggttcgtccatgaagatgatactaggctgcgcaacgagttccacgccgatagtaagacgcttcatttgctccgtggatgacccgcggatgatcttgtcagcgatgggccccagctccagcaaattgatacactcgtccaccgactccattttttccttcaacggaatgctcgcgttctgacgcaacatggctgagaacacgagagcctcccgaatcgttgccgattccgagtggatgtccatttgctcgcaataccccgtgcatcgacgaatggcgagatcgttcgcaggatacccgttgagcacgatcttgccccgaattttgcctccggtcttcctaccagcgataacgtccatcaacgtcgtcttgcctgcaccggacgatcccatgagagccgtcatggttcctggtttggcatatccagacaccccttggagtaggtcgatgtcttcccctttcttcccgccgggcattggcacggagtaccaaagctcatgaaacgccagcgtgacgggcggagctttcgctttcgaactggtaattgtgattccagcttcgtcagatataactccactttctctctcggcggtgattgcttttgtttgagtttcaaggtcgctcaccactgctgttgtgttctccgggctttcatagcgcttgtactcgagaatcagatacgcgaggaaaacgagaacgatgtatcccgctgcgaagtaaatccaccccaggaaaacccagaattcgcccgtcggaagaccggaaagcttgagactatatttatcaaatgtcgccccgaagcgagtgcagtaattgatgccgccgtagacgcagacgtcgaacttgggcgcgagatactggttcacgctgagtgatcgaatgctccatgcgagtcgggtccagccagtagaaccagataaaatagttggggatatctgtctcgcagcaaaacccaccaaacatcacgaaaaacagaatggaaaccatcaccacgggctgagcaatcgtgatgctcggagcagcggctgagaggaagaagaaataggctgtgaaccacatttgacacaggaagagcgtaaccagaaagttaatgaagcggtcgaccagtgcgacgtagccgcccatccagtaaacgcttgacccaaagagcagcgtctccagtacggcgaacgggatctgcgtcagcgatgatgccataacgtatgcgatcgatcggaaaaagttagcccgccgttgcttgtaaaacacacttggagcccccatcaaggttggtagctgtgcggcttggtccatggagagaaacatggtacacgagaagagcagcccgaggatgagctggctattcgagtcgttcatatgccagaacacggaaccgtagagcaatcccatgacgatcaccatgaaagctcgaccgaacataaatgctttacctcgcaaacggagttgtacttgacgctgcaagaccaccgcgaggtcttcaagaaaggattgatggggtcttgaagagggtcaaagacctcgggagtcgagttggatcggaccctcatgtagctcagcgtctcctggaaaatctccgactgcgcgaagcgatctgcaaattccgctgactcgaagggaacacttgacgtagtgtgctcttcgctaacgtaggcatgctgcttgtcggtccccagatctagcaagaagttggccatgcgaggtggacactggaatcccatctgctctgtaacagggttacacgagagttacccgatgggttacgaagtgggtacaaactgtctaacctaaatcagtaggataatcagtacatggcttcagagccactgattatgcatatgactagggttcactatgctagatagtgaaccggatacatttacaccataggcggctttgccgcaataaagggaactacattcagtttgagattcacacagctaagagttaagggttgactcttggagtccgtaaggtgtacggactcgtacgttctggtattagaacgggctatcttaagctgagactctgtgagtctgttacgtcttgctctgacactaaaactacggtagccccgctgcacttggtagcactcgtagtcaatccgacacctgagtctgtatagactgaccctctgtggagaatggagcagttcgctcacttgccctcgaaccagcaggatgcgcttaaaaagcttatgtccttgctgggcccggagggcgtgacgcaactcgcgcagcaaggccccgacgcggtgaatgcgcgactcgaggcgttttcaagctacgagaatgctctgctagggcccctccagcagaggatggcaacggccgcggcgccccaagcgcccgcttcgtcatccgacgcgggaacaagacccaagccgctcatgttgagcgtgaagacctgcgaaggcaaggagggtgaaagcttgatgctttggacccgtgaagttgagatggcaatgagctcagctctactccggacggagtcgcagcgcgtggcactagcaatctcgaagctcggtgggcgagcgagagagtgggcactaacgtccgggacgtcggtcgagaccaccttcccgatgtgggaccagctgaaacagcaattgtcccgggtgttcgctccgcctaacgaggcgtatcgcgtgcgctcacgcttcctggctactcggcagagcaagaacgagttggtgggctctgaccagtcgagtgcgcttcttggtccggcacacgctgacgcgccgtttgccggctaacgcttcctgctgttgctcgtgtccttcgctgccagcttgaccgcgcacctgccctgcatccgacgcgtgttgtacggggtcgaaccgggcgggcgacagctcgttctcaccatgcagttcgttcaacgcgtcctgtgtctccttatcatgaatatccagcttgtcaacgttctgcacgtccgcactcgtcacgatcttcttcgtccggggcaagaacaaccggtagcccttctggccctcgtggacacggatgataacagctttctcggcccggcgcttcacggatgcagccatcttgtgagcgatgtgcgtggtgcaggtggaaccaaacctcagcatatgccccacgctggggactttgccggtgagcacctccagcggagacttaatgtctgcgttcgctcgcgttggtagccggttgcggatgtaggacgcgtatttgacggagtcggcccagtaccgctcgggaagacctgacgcccacaacatcgcgcggcgcgaattcatcagtgaacgatgcgtacgctctgccttgccatttgaggcagagttgtcgggcagcgacgactgatgctggatgccgtggcgcttgcggtaggcctcgaactcgcggcctaggaactcacccccgccgtccaaccggattaccttcacggccacgttgtactggcgctcgagctcgggcaggaattccaagattcgcttcgccgcttcgtccttcatttgcagcaaatacaccctgttgaaactcgagccataatcaacgatggtcaataggtgcttgtttccgttccgatcgggaggcttgatgtcagtcttcaggtcgactccgagtacagcgccaacttcgtccgtcggtgctgaggtcgacgtatccacgtgatgggccggcctgcttgttgttgctgttactgttcggcggctggccgcgctgttgtggcgcttgactggcgtcccgtccggactgcttgccctggccgacacgacgtccatcgccttgggagcgaatcaggaagtcgatcactatgtccagctccttcatgtagttcgtgctcgcgtcgtcgcatatgaagataactgacccgagacccacttacatagcaataggtagctggagagtcaaagttcatgggtaaacgggatggtagccgcagccgcccggtaccttagtggaccctgttagcggggttgatgcagagctcgccctgagtgcaatcggcggtaaccgcaaaaaataaaaataaaagcattggcccgaggctcaagctattcatacttatgcactagcctccgcttcacccagtttctgagccacaacgctctgccttgagctcaacatatcagtgagaattattgctactgcggagacagctatagctggtaaaatcttacccacaacttacatacctgatattattgctttacatgatacgactgtcgtccaccggtcgtatcaggtatgcaaggtttatctgtatcaagtttcacatttcatgtggtccacacacttgtaccacatcccgtaccagtcaccgtcggccagcagcggcagccagccaatcccggcgccaaccatcaacgtcgacgcatttgcttgttgcgcttcctacggccgcaaggatcagccgcctcccgtagcagcagcagcagcagcagcaccttactaagcagcagcaatgggcgcgcagaagaagaaggccaagttcgtggccaagggcctgctgtcgcagaagatcaagcagcgcaatgccaagaagaagttccaggccatgaaggacaagaagcgcaaccgcttcgagcgcaacagcgacgcgcccagcaagaagaagccgcgcgtggccgcgggcgagggcggcgccggcaagaaggacgagcccgacatgctggacgagatggatgtggacgacttcctgaacgccgacttcctggactcggacaacgaggaggacgccagcgacgacgaggccgaggccgagacctcccagagcacggccaagtcggctgcgtccaagcaggagaaggacgacgacgacgtggacgacggcagcagcagcgaggaggaggacgagagcgccctcgacccgcgctacatgacgggcacgcccttcggcggcaatgacgatgccgacgaggaggctgtggctgagggcgacgagaaggaggacgatgaggagaacgacgacgccgagcaggagcaggaggagcagcagggagctggacgcaccgtcgtgaccatggccgtcctgcagaaggccgagaaggagtgctttgagaccaagtcggtctcgggcctgcgtcgtctgatgaagatcttcagcgacgcctgccgctccagcgacgccgccgactccagcaaggagggcgaaatcacgtacgacgtgcagagcagcgccgtgtacaaccgcctcatggtgaacgtgttccgcaagacgcacgcgacgctgaccacgttggtggcgctcgagtcgacctcggaggacgacggcaagttcaagatcgacgacaagaagtggaagaagtactcgctggtgatccgccgcttcttcagctgcgcgtgctacctgctggagcagaccaccggacaggacattcagacgttcgtgctgcgcgagctcgtgcactacattccgttcgtggtgccgtgccccaagacctcgcggaggatgctcaaggcgctgctgaagctctgggccaagtcgctgaacgccaacgtgtgcatgctggccttcgttcgcatccgcgacatggctctggctgtgcccttcccgttcctggagctctgcctcaagggcatctacgtcacgtacatgcgcaacaccaagttcacgaacgaggtgacgctgccccaccacgtgctcatgggcaactgtgtcgtcgagctctttggcctcgacctcagcagctcgtaccagcacgccttcgtctacatccgcgagctggcaattgctgtgcgcaagactatcacatccccgggcccggactcgttcaaggctgctctcaactggcagttcttcaaccagctgcgcgtgtggactgccgtggtgtgcgcgtacccggccgagaaccagctccgcgcgctcgtgtacccgctgagccagcttctgctcgccgtggtgcggctatcgagcacgctgcgctttgcgccactgcgtctccactgcgtgaagctgctccagcagctcgcgctggccaccaactccttcatccccacgagcccggccctgcttgagattctgcagctggagccgttccgttcgtcctacaagggcagcggcaagaagggagccaagggtgctagcaactccaccacggaggtggacctggagctgtgcgtgaagctgtccaagactgcgctggacgccaagcgcgtgcacgaccaggtgatcgtgaggctcttcgagctgctgcagcgtgagtgcgacgtgtacaagttcaatgtggcgttcccggagttcgcggtgccgctgcagctcacgctcaacaagttcatgcacgcttgcgccgtccccaagtggaaggcccaagtgcgtggtctgagcgacagcatcaagaagcgcgcggactggatccgctccaagcgcagcggcctggacctgtgcccgaaggacacggcgcagctggacgacttcctgcgcgcggagcgtgaggccgccgtcaagaaactgttcgagaaggacgcgacggacctgcaggagaagctggacgcttcagctgatgcctccaaggagaaggaggagagcagctccgagcaggccgaggacgacaagaagaagaagagcaaaaagaggaacaagaagcagcgtgccaagaagtcgggcacgcccgtggacgaggagacggtcgccaaggtgaagaagatgtcgctcaaggagttcaagaagtcggtggccgaggtggacgccgccgacgaggtgggcgacttcaacttctcgtcggacgaggagtaagtaagtagagctacagacactgaatagatacatacacccccatatgcataggactgctcaccgaccattttgttttggatagagatgtgggatgtattgctatgtgtgatggatagtgtttggggggcaacgggcacgtacgcgttcttcttgtctacagcttgttcgagtccgcctacagcacctaatagagactggtcttcttcatgatgcgcaggaactcgtcctcgttgatctcgccgtcgccgtcgcggtcggcctcgtcgatcatctcctgcagctcctcgtccgtcatgttctcgcccagctccttggccacgcgcttgaggttgcggaacgagatcttgcccgtctcgtcgtcgtcgaagaggcggaaggccttgaggatctcctcgcgcgagtccttctcgctcatcttggacgtcatcatctcgaggaactcggtgaagtcgatggtgccgctgccgtccttgtcgatgtccgagatcatcttcttgatctcctccttcttgggctcgaagcccagcgcgcgcatggccaccttgagctccttggcgtcgatggtgccgctgccgtccgtgtcgaacaggtcgaaggcctcgcggatctcctgcttctgctcctccgtcagctcgaacttcttgttcttctgggccgcgcccttggccttggcgccgccgcgggagccgtacgcggaggacatggtggtgtgtgtgtggataggagcggggcttgcgcggtcctgcacgaagcggggaatgaagcagacggcgacggtccgacgcctcttggggcaccggatgacaggccgaaagatcgccagcgccagagtaaccctcacaatggagtgtaacctcttggtggtgtgggttacttagggctaggggagtattcttcacgtatttttttgaacgaattgaaatttaaagcgatgtctctcgtgctcttttaagctatttaagcgctccaaaatgctaacaactcgaggtgtgaagtccatattctgtttgttcagatccccagaataccggatttacgagtgttatctcaaaactttggcatattcttttctattgaaactcctgcaaattcaatcggacgaaaatggtttttactgatttctacgggtgattttcactttcgaaaagttgatgtccgaaattcgattggtcattgttcgattatttttatctccgatgtttgaagctatctccaacatttgacttaagttctagcgctgggccgtgtactagctctgaggtatgaacgtggctcgtgcatcttagcgcctagctattctccggacgttgaaccgcggaaacagatatgctaacaggcaatcaacacgggatacgacctcgtttgtacggttgggtggggttggggtatcgaaaccgttttattcaacctgtattccctgggatggcgacgctgtagaaaacacgaattttacattctgtgagttgaagtaaattccttccgttttcctctcattgcgcgtcctacttcaccgtccatatatcgatcccatcggcgtaatttgctatgtttcgcttttgcaacgcgggagagcagtagttgagaagccattaagcacggatgcttcgttgcaccgtcaatgatcttctcacaatgcacttaagatgccgtccttaaccaaacactttaagtaagctgtaacgctgaacaatccttgatgcataatgcaaactactaaacctttcaaataactttcgtttgtgttgcgttagtaaacctcaacctcgtaatcgctcgcaaacagtaccggtagtgacgctgtttgtgaattaacaagataaccgctacataagtcacacttaaaaaaaatagttgcttttgcataacctacaaaaataaatgtaataccccagaaaattacaaacggtgtttttgtacactgttttttattttgttgggaaagtatggtttaaggttaattgagaaaaagtaccgatgtgccgtactgtaccggatggtttcttcattttagaaaactgaagttgtttctttaccttttaaagtggaaaaacgtattcagctaaaaaaaagcggcgatcttgtgtcaaggttatgctatgacaggtttcgatatactgtagtattttcattgagtcttgcgtaaagctttaatctgctgcacatttaaaaaacttcagtagtgacgctcgtaccagtatcgagttacgaccaatgcacttgtacatgtacagcggaacgtttgtgcagtaaaacacacacgctttgatcacatgttcatggcctcgagccgctcgagcgtgaaaacagtgttttcaaaacacctcagcctcgcagtgtggcaccacatacggagtgcaagatgttgcttatccgctggggcgtccatccagctgtcgttcgcttttgctcttgggttttgtatgctgaggggtacagagggggtacgctcgggggtacatctggcgcagagagccggattgtgtcgatgcatggccgggccactccaacaccttcggcggaagagcgaccgccacacgcgtcacctgttgcagcattgtgccccgcggcttacccgagcatttgacggcgcgcgagcagcaagtcaagctcctgccggtctctgtcggctgggcgctggctgttcgcattttctaatccccggccgaccgacgcgcacccgggccaaggccatgagcatcagcgtcagtcgcgagtccatctccaagctcatgggcgagctcgtggagaccttccccatggaggccgagggccgctcgtccatctcggacttcggcaagctgctcttcaccgagggccaggccggcggcgcccccaagggcgacgggccggcagcgccaccggccggcgtggccgccagcaagccggctccggccaagccagcggtcatcaccaccacgcagagcggcagcaagcgcgtgttcacagagatcaagggcgtgccccgccagaagcagcacgacgtacgtgggccgaggcagaggaggtagctagttggtacgagtagagggctgacgggcgtgacgttgttgctgttgttgctgctgctgctgctgcagattatgaagacgaaggacaaggccgtgcccaagcgctggacgcaggaggaggacgacaagctccgcgaggccgtgggccgccacggcgagcgcaactggaagtccatcgccgaggaggtgcccggccgcaaccacacgcagtgtctgcagcgttggacaaaggtgttggcccctggcctggtgaagggccactggcggcccgacgaggacgagctgctgaaggagctggtggccgagggccgcaagaactggggccaggtggccacgcgcatccccggccgcacgtccaagcagtgccgcgagcgctggtacaaccacctggacccgagcatcgtccgcggagagtactcgcccgaggaggaccgcatgattctcgatgcgcaggccagactcggcaaccgctggtcggccatcgccgccatgctgccgggccgcacagaagacgctgtcaagatccgctggaagtcgctctgcagagtgcgcaaggggtgcgttgcgtgtgtgtttccttgcttgaagtttgtatgcaccccttgaggaggaactaacgtaacgctgacgtgatgataattgttgcaggcaagggcgtcgtggccaggccgacaagaacaagatgacgccgaagagcgtcatgggcatgcccggccaaatgatgcagcagggtcctggcttcgacggcggcatggttaagagtgacgaggtggccgcgttctccatgcacgcgcagcagcaaggtgcccagatgatgcgacttccgaactgccaagtggtgccggcagggagcatgcagtccggtggccagcatcacccgagtatgaacatgatgggcggaggcatgggcagcaacggcatgatgtacacgagcgatatgagcggcggcggctatgaccccacgatggtgcactaccgcaagcctccgatgcagcagcatatcgtgagcaatggctacgaccactcgctgcccccgtcgggatcagtgcaaaacaataactcgcacgactacgatcgtcggccgaacatggtgaacgcgtcgtccaacggcatgtcgggaccttcgcagcagcaggataactaccgccagggttacgcgggtccgtcgtcggggtatagctccaacctgaacggcggcatgtaccccacggggtcttcaacgcccagtggaaacatgaacaacgggcagatctatggctccgccgcgccgatgaactcgtaccggtctggaggaggcatgtacggcagctcgcaggtgtcgcctcaccagccgcagcaaatgtcacactcgccgcacccgcagatgatgtcttacaactatgacatgccccctacgcccagttcaatgaatggcgggtcgtcgtcgggcaactcgatgatgtcaaacaacagcggaatgagccccgccgcggcgttcgtgcagcagcaccagcgacaccagcagacccaccagtacgtggatcgcgcgccgccaatccccccacatttgcagccgcagaacgctcaagtgcagcggcatatgcctgcgcatgaggaagaccagcccaaccccgagaaggagcctccgtcgtcgcgtcggtcgcaggaggagcagtcgatccacaacggcgtgcaagccaaggaggagccgcgatctgcgcaaatgcccgcgccttctactcagccgatggccaacccggccgctatgtttgctcgcagtcaagctgcgaagagctctccgtctgctggtaacagcaaccccgtggctgcgttcatgcagatgcaacagcaacagcagaagcgcaaggagcagcctcacccctctagcaagcagcattacgctggcccgcagagacctttcaaccctgcggcggcgttcgcgcagcggttccaagctggccagaggccgccgatgcccagcagcaacgctggctccaccaaatctaacgacgacacggacgacgatggcgacaacagatctaacgagccgtcgctcaagaaggtcaagccgagactcagcatcgatgctgcgcgggcgtcggccgctcgacggctgcgcaactctggcagcggcggcaacctggccggccggggcagccttgacgtgttcttgaacgagatcggcgacgtcggccggttgtcggacctcaagatggacgagttccagacgctggacgagctgtggcgagtctcgggcgacatggatcggctatcgttatgagctggttttgatcaggaaagtaggttcgttgctcgccccgcgcgcggccaattaaacatcggttttgttcatgtagactcgtttgctgttcgtgctgctgtagtgtggcaggttcgacccgggtcaacggctacgcgccatcaagcgcctcgtctcagccgtaccgcatccacactcgtgtcaaattctttctgcgtgttgacgtgttcgatgacgtgaacgaaggtgataccgggtcgcgggtcaaggtcaaaggctggcccagttccgcgcgccgctggcctacaagtctcccattgcacaatttgcattggtgtgtgaacgagctcaaagatgatgaatgaaggccaatcagcgccaatggcgccacgcaccattctcctttcgatcgatggcaggagctgtgccaagaactgcgaggtgcagcaagctctcagtgccgtggaaggtgtcgtggcggcgtctgtgaatttcgattccaacaacgcgtctgtcgacgtggcatctgaccgccaattcgacgatgaaatgctactggaggcggtccgtagtgtcgggcccaagttcaacgctcgcctcgttcaagcatcgcactcaagtggcgtgaaggctcaagggatccatgataatgactcgagagaagtttcgctatcaatcgacgaggcggacaagagcgcgatcgccaaagtgacgttgctgatcggtggaatgacgtgcagctcgtgtgccaacaccgtcgagggtgctttgaagcgcacagagggcgtcgtctctgcatccgtgagcttagagactgagaaagctgtcgtgcagttcgatagggatgttatgagtgtcgaagcgcttgctaaagctgtggagaatgtcggataccaagcctcctcgtgcataccgaaggacgagaagagtgaaatgggcgacgcaacactgttgatcggcgggatgacgtgcagctcgtgctccaactcagtcgaaaacctgctgaagagcacgccaggcgtgttatccgcctctgtaaacttggcgaccgagaaggctgccattcacttcgataagtccgtggtcggcattcggacgctgatcgagtcggtggaggacattgggtacgaggcttcctacgtgactgaggccaatgcgctacaggctctcggagatcagcgcatgagggagatctcacagtatcgcaccgatttcttcgctgcattggtcttcacgcccccaatcctactgataatgctggtgttcgagaacatcgcacaggtcaagcacgggttaatgtcggaagtcgtgcctggcctttcctgtgaggcattggccgtcgcgattctcgcgtccccagtccagttttactcagctcgtcgattccacgtcgacgcttggaaaggagtgaggaaccgcgtgctggggatggcgttcctggtgtcgatgggctcgaatgtggcgtatttctacggcttgtttactgtgattcgtgccatcgcgctggacaacgcggaggttgcgaccttggacatgttcatgacgtcgtcggtactgatctcgtttgtagtgctggggaagctcctggaggcgactgcgaaggtgaaaacgtcggcggcgctgaccaagttgatggagttgcaggtcaagtcggccacgctgttgatcttcagcgcggacggatcacacatcatcgaagagcgagtagtgccgattgaattggtgcagcgtggagacgtcctgaaggttgtgcgtggatcctcggtccccacggacggtgtggttgtgtatggcgaaggcagagtggatgagtccatgctgactggtgagtccaagaccgtaaagaaagtcgttggagaccgcgcgctgggggcgaccttgaatgtggaagggctgttccacatgcaagtcacggggatcgacaccgacacggcgttgagtcagatcattcgacttgtggaggacgcgcaggcctcaaaggccccaattcaagcttacgccgactacatctcctccatcttcgtcccggtggtagtcgcgcttgcgttggggacgttcgcggtgtggcacatactctgtgctcgggatggcattcccaaagactggatccccaactcggacgggaagtttgtgttcgcgctggactttggcatcgcgacgctggtcgtagcgtgtccctgtgcgttgggactggcaacgcccactgctgtcatggtcggtacgggtgtcggagccgcacacggggtcttgatcaaaggaggcgaaccactggaagctgctcacaatgtgaacacgatcattttcgacaagacggggacgttgacggtggggaagcctgtcgtgacggatgtgcatccactcagctcaacgttagacgcggaggagctggccgtcctcgctggatccgcagaacgcggaagtgaacaccctctgggtgcggccatcacggactacgccaagtccatgtcgttgcctcttgagcagccgacggatttccgtgcagcttcagggaagggcattttgtgttgcgtgggcgaccgggatatcatgattggcaacaaagcgtggatggaagaaaatgacgtcgaaggagcgaaccgcatcgaagtcatgcagactgtaatcgcctttcaaaacgccggcaagacgtcgatctacgtggccgtcgacggggaactaagcggtgtgttcgctgtggctgacgctccacgtggagaggcagctcgtactctgagaaagctgagaacgatggggttggaagtctggatggtcactggcgacaatacgcgaacagcgttcactatcgccgagcacttggggatgaatcgtgacaatgtgatggccgacgtgcttccgtccgagaaggcgtccaaagtgaaagagctgcaggacttgggccgcattgtcgccatggtgggcgatggcatcaatgactcccctgcacttgctcaggcggacttgggcatcgccatcggcggtggcacggagattgcagtcgaaacggctggcatggtgctgatgaagtccaacttggtcgctgtcatcactgcgctgcacttgtctcgcacgattttcaaccggatccgactgaattacgtgtgggctttcggctacaactgtctgttgatcccgctagctgccggcgtgctgtacccggttgggtttagtatcccgcccatgtttgccagcgctgcgatggcgctctcgtccgtgtccgtggtgatttcgtcgctgctgcttcgatattacacgcctccaactgtcgccgatgatgcactggagcggaagacgaaggctatgttgcccacggagcagacgctgtctgcaccactgcttgcatccagcacgctgcaagatactgaatagtcgggtggtctcgttcaaacatggtaccaaataacttcaatgcatatacatgtattctgtctaggctatttaccgtaggaaccccctgcattctgcgcttctcaaatgaaaacattgtacattcaccaagttaatggtctcatttctgattttccttccttgggcacaggcgaaccggagcacgccggctcaagcgacagcgctgcgtagcctggtttcctgtccgcgagatcctttttcgtggacgataacacagcactgacatgagttgagtagagcgtacgtacggtgcagtacagtaccgcatgattcgcacatccttgcatgtactaatcactcgtcgtcgaccgtcgaattctgtccagccaggtgaaatcctccccactcgccaatttaccttccgccactcaatctacacacacactggaaactcgacatgcgaatactcctagccgcgaccacccttgtggtgctatgtgatttcgcgtcggcacatatcacccaagctcacccaggaaacgcagctgcgaacagtgccagtagtagccgattcttacgctcctatgagtcaattcacggcgccgaggagagaagcatcggaagcgtgctgaagcagttgaccggtttggagaagaaaatgaacgatttccgcaaaaaggacctgatgagggcgctgggcgacaagaagttccgagtcgacttgctcaagagctggagcgagaatcaatacaccgtggggcatgtccagggtaagctgaaagtggatccattccacccgcgctacaaacagttgctgctcgactacatgaacatttacatcaagagcccggcatcacctgcatcgctgactcgcaggaagaaagctgacgtcaaaccggtgaaaaaagttcgcttcggataacaccggtacgagatagagcacgtcgattaggtaacagtagtagtagtacttctcagggtcgtaacagtgagagattgaacaatcgattctccccgccgaaggaaggaaatgtgcccgaactagtacgtagtaagtggtattgcctgaagaaattccagatactaactaatatgggccgagctctctcaacgcagcgtcagtgtcggctgtaatctcgctgcagtgtatgattgccatacccgtactgttgaagtcattgcactccaagaatctgtaccgcaaaaataaagaaaaaaaagaaactttgtgtttttgtttaaagttgacacagaaaaatgatgtggtcgctgggtgcactatgcgccatggttgctaccacccttctcgtgctcggataaactttttctgctatttgtagtacactgcgtactgcttcgcaatcgcctcctcggtgtttggtgctgaatatcgacccgatgactttccgtggcttgattcctgcctcaacccatcggttgaactgcagtccctgcaactctgttgcccggtcttctgtagctttgaccttcctcccggctttgagggcatttgccaccatggcatcggcctatttggtggtcgccgtcatgatcgtcctcatcaaggttgtcttcttggccgggttctcaatgttgaacgcattcacgtaaagcaacatgatgttcacagccggattcgtaagaaggttctccaccccctcgtcgagctgtaacagcttgaacacttcatccggggacttcttagcagaggaccagccctcgagtaattccctcctcaatgccctcgccatggtctcagtgctggaaaacttcgtcgcctcttcaatcatcttggccactgctgcgtctccgtaggtcttcgtcatcgtctcaagcatgggcacctccttccccggcctctgcttgttcaacatctccacgtaggacgcccacgtgttcatgtttgggtgggcgaggagattctccaccccgtcgtccagcttcagtaacttgaacacgtcgtctgaggttttccccatttccaaccaagtagaaaggttctcgccagcggttctaggtttcaacagacctacgagcgtgggagcgaaagccccctctcttggtcttcagcattcgatgtctcgatacaagtatctcttaattaagatctcgccctacggatgaaacagcgttgttggcttcacaacccagcaaaacatagcgtgcccaacctagttcatgatcaggtggtcagccttaccggggtctgcttgcatagctcgctaccacaatgttgagaggggctccgcgcgatgccaaagtgaaagcaaaaggattatctacacctttgtgcgtaccaacgtgcaatcaaatccgaaagtcgcaaaattcatattgcaaatttctagttagcaacttcaattatgcattcaaagatggaattacggcaatcaaattcgtacagtaggctactactacttgtccgacgagccctgttacatgccgtacaccatgtcctcgttgttcgccgccttggtggcgaagtcgcgacagtgcagctccatgctggcctccagcgctggggtcatcacgttcatgttagcggtcgcggcgcgctccaggatgtgcatctggcgttccgagatggagaggatctcaccgttgctgtccggctcacgcgagcgatcgtagattgcgtggcgatccagagccaagtctcgcttaatgcgggattttaggacgctgcttctcgaggacggtgtggcgagtaacgcggccttggagggacatctgcgaagaagaaggcgaattgcgaagtgagctcccctcggtcggcgtcggctatagtgcgcgccaaaccgcgcgcccttgcttttggcgcgagcacaacacgccagcttacgtagccatggagatcttggacctctggtccaactttgattgccgtaattccatctttgaatgcgtaattgaagttgctaactagaaatttgcaatatgaattttgcgactttcggatttgattgcacgttggtacgaagtaggccgcacaaaggtgtagctcgggcagccagcgcagcaggcaaacataccgccgtaataccgcgagacgaaggggcgccgtgcacttatgtaccattgggtgcctgccaaaagggtcataaggacctaacatagttaccgcagatatgcgggtagatatgtcgacatatagcctagttgcacccgccacaacatgcttatcgacaacaactccgtccgattacaaatgcccaagtaccacctctattcgccctacagcgtcactttgctccggacattcatatggctagatctttctgcagactgcagtttatctcagcatgctcattacgatatgagcactcttctgctcacgctgctgcggtgatggagctccagaatgatacgtgcgacgctctgtgtgtgctgtgcgaggcctacgtgagctacaacaaggacctgggcgctgttcgacgcgcgattcacaagcggctggtggaagaagatatatgacagcctgtcattgacaggcgatcttcacaagaatgatggtcgacatattaaatacaaagtcgtagtaagtcgttaagatgggtacacggcataaccgccagtttatcgagacgattttccggtctcacgagatttatgttagcttataccgagcatttctgctgcatttactccgggtcgttatgacccttttggcaggcacccattactttaaagccctcaacaaagcatagcgttactaaaagactgttctctggattttatccagagtccatgggtgaaggccactgaggtgtcattattctcacatcaaatacctgctaaatatgtgtttgagcgctgctgatgctaatatctaaaatacctgttatactggatagcctgcgatctaatcaaattatgctgctatgttgacccatccggttgagattgagtcaaattacctattattttgcataccctttaatcaagtatatatacctgtgatagatagtttatctgccactcaagcgacatccatcggattttttttcgctccaacaacatgccggcaaagatgtccagaccagattagcttgattaggaggggtagaatatatataaaaacgggtacgccaaatcctaaatcgtagcgttggtcgtaaaccgtccatgtgcaaatccctatcaaatgctaatgagagcctagcttcctgtgctatataaatggccgcagaggtgcactgcatcgtgcagcgggctagagcaagcgtatttcagccccgtgaatagttcagacgcagacacatattgcatgcacccatcgggtgtttcatgtatacggcagcgtcgagtttgccgtccacgttgacatggggcaccgttcatataaacgagctaccctcataatacccagtgtgacactggcagtctcacatgggcattcgacgtgatttgagtataaatcgacggcagtccgcggtatatgaacagggctggggaacgccaaatcggagtataatcctatttatatataacaaaacaaggtgtcagccgcttaataagcacccaaatcgatcgatttgcaaaaaaattggacatagtgtttggttttcacaatattagttaggcattacgacgaaagcatcggtcactggcagctacatgattagctatgacctgtggcaagagccattaggtccggcatcattagtgaagacccagaggtcatgcgactcaggcctcgtgcgcaggcagcttaagcaccggggccgtgaggtgatgccgtctctcgagaacgcgttccagtaaattgatggagctcggtaccccgttcaactcgacaggaatcgtcaagaatcgcggctacatctacgtagacaacatcgacatcgttaagatcgtcggggtcgctagcttgctacaatataaccaaatcattttttgtaccttcctattcagtatcgaactctgggtcgtacgggtcacactaccgaagtataaccaaatgattttttgtaccttcctattcagtatcaaacggtcttaattcgtgcacttgatcggtcggctggaagtacagattccatcttactcagtttgcgatctccttactgcatgatcaccattaacgttgcccagctgattgaattcatgttgagcaggttgtgttttattatggacgatgatatggtggataagagaatcagtaagcgttggtttgagtgatgttttagttgttttttcggctactgtcaggtagttaaataagctatgtatgtgcaacggctttctgaaaaacaaaaaactgtcatttacctatcctagcctacgtgaagccctagtaccgcagcagtacgtccggtaatcaatacctctagctctgtgaatacttggttgtttcgcttgtggctaaagggagagactatgttgttccttcgtccttttatttcgaattgcacttaaaaatgtcagagctgaagtacttcaaaaatgcactaccagcccaaacctctagtgaattcaacaacggccactattcgtataaatccgttaattcaactaattgtggttaccctcgaccaataccatatctctactcctttctgccattggcacgtagaaacaagatgccgcagtacactaacttttttacttatatgcccaagagcgacgtaaaatccagagctgttccgggcagagcacggccttgttaaaaggctggtgatccctcgattcgaggggtccaaaagcccactatacccaagtaaaatttggggaggtcgagggccccgccctgctatacattgcagccctaaacctacttatttatccaatcaatcaccggacactacagtaaggagaggtataccggtaccaagtcattttaatggggacttcgttgtggcgtagcaggatcagcaaaatctgcgagattgccaatccaacttaccaactgcgcccgaacaccgacttacggagggggtcccccgatgatccgtgatctgtgtgctgaactggtcaccttgtgtagggctggatctgctcctctggtgtctgctgaagcgtccgagtcttgaagacaggagagtctgggcgagacgcggggatgtgggtggagcagcgctgaaatcttcactctgctcgcagtagttactcccaatccagtggtagtcgacttggatcgggcggcctggatctggatccggccgtggggttgcatttgggttgttgttgttcctttcctttgccttcgcaggtcttcctttgtcgtacttgccgcttcctgtggcgggatccgtagatgctgagagtcgaggatgcacccggccaagtagtaactccgggtggatcggggatctgcacttgcaagtaggtcactaggaaggttgtagaactggccaatgtattatccagtcttaaccaacgctagatccactaccagaaccttgctaagccgtggggccgatgtacttcccgtttccaggcgaaggcacttgcgatgtataaggcaaattcgagtctgatttatgcttatgtccaatcccatcccaaagtcctatcttcctatggatcctgtcatcccatctgtacctactgacactatgaagcttgttcaccttccttgcgtgtcgcttgattaccttcgctgcgccatgaccttagatccaccgctcacttccatctgagtccgaatcagaatcagatctggattggatcggatcgccgatccacttgacagctgcatctcttggatcttgggtctcgaggcatggcgttgcttggccacacattcgtgacgtccggtcgtattcgtagtgtcttccattgcaatcactaacacctggtacggggcccgatccaccagtctggtggatccgtcgcggagtctggatctatcattctgccgatcaccctttgtcccaatttcttggatcctgcttctccacaatcgcctcctgtctgtagttgttgccgaccagcggcatcactgcagacacttgttctcactttcaaatccaccaagcctataatactatggcagactccgcccgtagcgcccctcgcactgccccggaagctcatcatctccactatgacgggtatactcgtcagatccaagatctccagggccaagtcgcgcggcaggctcgcgagatccaaggtctccgtcattaccttgaccgagttgagtgtgagcggcagcgcttgacagagagcaatgatcatcacgcgtccgaggtgaccctggccggtgctgaaatctaagagcttcaagttcattgcgccaaccttgaacgagatcgggtaaacgctgaagatgagcgcgggctcgctgaacactgcttggaacgtgcgcaagaagcgctttaaaaggctgaggctgagctctacaatctccgcgctgtcgatggccagtaaacactgacgttgtgccgtaatccatctcgcttatcactctcttactgcgtcctcatttatttcaaccgtcttcatctccaaaagtgcatttttgaagtacttcagctctgacatttttaagtgcaatttgaaataataggacgaagaaacaacgtggtctctcccattagccataagcgaaacgaccaagtattcacagagctaaaggtgttttgtttttattaccgaacgtactgctgcggtactagggcttcacgttggctaggataggtaaatgagagtattttgttttcagaaagacatacatagcttatttaactacctgacagtagctggaaaaaaaaactaaaatatcactcaaaccaacggttgctgattctcttgtccagcatatcatcgtccataatactagtatagcagcatcctcacggcgaattttcgccccggttgctagaggggcattgcttcggcaaatgttgtatcttagcctttcagcaccgcccccctgtatcctatacacgcacatacttttaccaaattggttcaaagtatgtatcctcgaagtgttcagcggtcaatggtggcaacgccaaagaatgtttatttactactgtaatatggagaccagagctaagcaaaagactatatattgatttacggttgaatgaggtcaaaatctacgacggcactaccagatgcggcacgaaatcccttgttgtttcttcaagcctctttcccgtcttcatttatggcggcgacggatgactcggacatgcaagttctatgtagttgatcgtcgggaacacgcgcgctatttagttgtgctcgctgcgctcgctcgtgacgtcggtgacatcgcgcgccctcctgccggtcgatttcaataatttttggtttaaacccggtcgattgtaataaacgtctgggtggacatcgttaaatacccccacagctccagactaaattgtgctcgagcattcagcagccaagatatcagtagaatcgtaactcatgtcgaacaattcagtcacattacattcaacgaccaccggtatgcacatttgttcttacattacattaatttaaagctcatcgaaacagcgagaccagcagcgtgccccccccccaaaaaaagtgcttttcacaataacaataactcactgcaagtgacttaaaaagagcttcaaaatgaacgacgacacggctcactccacatatatgtacatgctagccagattcactatacactaacaaacagttaacaaacgctagtgttagctatacatttggtatttgtgtgaatattcattatagaccgaaaaattggtgtcagaattgcaaattgctactgtaaaaactgtaattataccccctccctctaattgtgccccaccccatgaaaatcggtgatagtgccccacactcaaataaatcactttttctgaaaaattgactttaattccgaattttctcttataaatttcaaatgtttcatatcacaatattaaagtttgtgcaacaacttaccattatcagtgattgctgtagaattcattgtgtaagtagactttttaacgcaaattgtatttggtcatccgaacatgtagtgccccactccctttaatagtggctcccttctaataatgccccaggggcactgctgcaataattcacggggcataattacagtttttgcagtactttagcttgcacgggaaatggccgtgatttaggaaagcaataatgtctttcttcctgtgcaaatgacaatacttcgtttatttatcaagggtgtcagtataatatcagggcaaagagagaatatctccactttttctttatagctacagagcatacattctggctgttgtctccactaaatgatccttctggcctagtgaccgctttctgtttcatgccaatactcgtacccggtagtacagaactgtagcaatcgatttaaagttttctcacagtacagaactgtagcaatcgatttatagttttctcattcaatgattggagcaactaatatgcctatacaagcagtgcaactaattctagtgctacctcttgtttccgcatgagtagttcgtaatagttagcgttacattagtatagcctttggatttagacttcactgctcccttgccaaggatctatcagtgtactgaccgataccttgaattaggttatctatgaataacttaatccaaatgactcttcagtacgttgtttcgtacgttagcggagactttttacagagctgcctaacctctcatatgttttttacggcgggggccactgtcatttgcctccgttaccacatttaaccggagttcagccaccccttgaaaagggttccacatgtgggtcgtcaactcttaccttaaacttcaacgattaacgcaatcgtttgtttgctgatacaaacggggcgatctccgattcgataaaacgttgacctcagtttaagaacttgatgtaccttctaacaaggtaacatttgaagggtcgtgtttgggcgccgtccaagatgagtttgtgcattcttaaaaagaggtaaaattcggtcgaaatcgcccccgggtaggctatgatagttcatttgccctaccccattctcaattgtaatacaggggttcattaattggagtaaaaaatacctgtaaaaaaggtaagaagtatttatgcacatttcattataaggggggctatgccccaaaaccacaacctgctcaacatgaattcaatcagctgggcaacgttaatggtgatcatgcagtaaggagatccctaactgagtaagatggaatctttacttccagccgaccgatcaagtgcacgaattaagaccgtttgatactgaataggaaggtacaaaaaatcatttggttatacttcggtagtgtgacccgtacgacccaagggcatctcctgagcctgccgcagcatctgcccagaaattgcatcgctattagtaagaagaaactgatttacaacataacacacgggaagttggggattgtagcaagctagccgaccccgacaatcttaacgatgtcgatgtcgtctacgtagatgtagccgcgattcttgacgattcctgtcgagttgaacggggtaccgagctccatcaacttactggaacgcgttctcgaaagacggcatcacctcacggctcctgtaacggggttacacgagagttacccgaagggttatgaagtgggtacacactgtctaacctaaatcagtaggagaatcagtacacggcttcatagccactgattatgcatatgactagggttcactatgctagatagtggaccggatacatttaccccgtaggcggcttggccgcgataaagggaaatacattcagtttgagatttacactgaagagtctaggattggctcttgaagtccgtagggtgtacggactcgtacgttttggtattagaacgagcgatcttaagctgagactcagcgagtctgttaagctttctctgacgcaaagctacggcagccccgctgcagctccggtgctgaagctgcctgcgcactaggcctgagtctgtatagactgaccctctctggagaatggagtagttcgctcacttgcccccgaacaagcaggatgcgcttaataaccttatgtccttgctgggcccggtgggcgtgacgcaacttgcgcagcaaggcctcgacgcggtgaacgcgcgtctcgaggcgttttcaagctacgagaatgctctgctagagcccctccagcagaggatggcgacggccgcggccccaacgtcatctgacgcgggaacaagacccaagccgctcatgttgagcgtgaagacctttgaaggcaaggagggtgaaagcttgatgctttggacccgagaggttgagatggctatgagctctactccggacggagtcgcagcacgtggcactagctatctcgaagctcggtgggcgagcgagagagtgggcactaacgtccgggacgtcggtcgaggtggccttcccgacgtgggaccagctgaaacagcaattgtcccgagtgtttgctccgcctaacgaggcgtatcgcgtgcgctcacgcttcctggcgaccaggcagagcacgatggagttgattgactatgtccaagagttgagaactctcattgctggcatgtctgcggacaccctgccggatgcagtcaccgttacggtgttcatggagggcctccgcactggcgttgccaggacggaggtgttccgaacacacccgagctcttttgaagaggctgtgagcgtcgcattgaatgcggaacacaactttaagtcatcgagacttgggtggaatgcgtcttacgctagcgcgtcaagtggtccggaacccatggacctcagctctgctgaagacgaagaagccgagcttcgtgctgctgagcagcgtcgcggtatccgcagatgcttcatctgtggtgacacccgtcaccttcgtgctgggtgtccgctgcgccatcagcgccaggcttcgtcaggccgctcttcgagttcgagccagggctctggattgtctcggggaaacgagaagtcccagtaggcgcggggcggcctactggggaagaactaagttctattgagcctcggcgaggtggaggtcgacaggacttagccccgaagagagctgtactctctaacacggaacgtgtatgcaagccgggcttgctagttgtccaagcttgggtgaagggcttcacgaagccatggacgattttgatcgattcgggagcgtcgggtaactacgcccggcgttctacgatggacggaagtcagctttatgctgaggcgctggtagcgcgcgcgagtgacatcgtaactgttcgtctcgcgacgggcactcgtgtcacggtgcctaaggtccctgtggacctgggcgtgacatttttggattttgatagcgtggaacgctgtctggtcttagacctcgattcgagatatgatctcatccttggtatggcgtggctggaacgccacgagccttggatcgattggaggtcgaagacccttggtgctacgcacttctctcctggcgaagcattggcgagtcatgaacccacctctgctaggaagcagaagcgcttctggcgcgagcactggaccgagtcggtcaatgtgctggacatcggagtctccgagttggtggagtgtcgggaacgagcgttccgagcgtggctcgcggacggcaggtggagcggcacgaattccgctgagcgggtgtgcgtatgagggcgacgccctgctgcgtgccagcgacggcgcgatcggcacaatgccgaagaacaaggggcgtcgcccggatgaagatcgtggagtggcacgtaatccactgagtggaggctgcggatcgtgcagctcttcgctgagtgtcggtaaagaccctggagctcccttggagctgaacgaggtagtgacacctggcgtcaagacgcgcgcgaaatcacggagctcttcagggcggacgggtccatgaagaggaggcagcgcctcaaagcgctggctgcgagacgcaaggcgtctgcgatctcacgagtcgagaagggcgtgtcgagcggtgaggctccacgcgagagcgagcagctctatacactcgtgaatggagtgacgggcgacgttgacggagatatcaacctcgacgacatgccctcactgtctgctctcctggagctggacgagatgtccttggccgagttcggcgaagccttgaaggctggagacttggctgaggtagtggtcatacgacccgaagaagagttgaactcgtcctcgcttctggatgaagctgtcctggaagacaccaagaaggcgccgaatgcgcggagcggatcggcgatcctgaaggacccgtcggatcccttgtatcaagtggtaaaggattaccaggatgtggtctcgaaggagctgccctcggggctacctccggatcgaggtgttcgacacgaaatcgatctcgtcccgggaacgaagtactgcgtgacgaggcagtggcccttgccgaaggagcagtgtgacgtcattgacgcgtttttccgtgcgaagcgcgaggcgggcatggtgcgtgagagtaagtctccacactctacgccgacattctgtgtcagaaagccgaatggcaagtggcgtaccgtgcatgctttcaacaagctgaatgccgctaccattccggcgcagacgccgattcctcggaaggatgttcttcagaacaacatgacaggatgtacgatgtacagtgcgctcgacttggtcgatggatattacctattgctcgtgaggacgagcgacattcctctcactgcggtgagtactccgagcggcatgctctgggagcggttggtgatgccccaagggctttcgaacgcgccagcgacgtttaatcgtcttgtgacgcagctcttcaggccccatcgggcgtacgcgcaaacgtacttcgatgacatctttgtccacagtcgtgctgagcacggaaaggctgatatggagaaccatgtggagcacctgcgtgctgtgctcgaatgcatgtgtcaaatcaagctgtacgccaacattgacaaatgcatcttcggagcggaagagatccccttcttagggtgcttcatcgggaagcgtggcctgagggccgacccggtcaaggtcaaggccattattgactggccggttcccaagaaccagaaggatcttcgcaagtggcttggcttggccaactacttgcacaagtacagcgagaactacgctgagatggctcggccactctccaatctcctgaagaaggatgctgagtggtgttgggacacctagcatcaagatgcgtttgctgcaattaaggacagtctccttcatgtgcctattcttgctctgccagaccccgctcgtccgtttagtgtcgtcggtgacgcctcggactttgccatcggctgtgccctgctgcaagcagacgccgaggggagcgagcgtgtggtggcgttcgaatctcgccagcagaaggctgcggagaagaactatcctgtccacgacaaggggcgacttgcaatgaagtatgcgctcacctgttgggctctcagccgttcgtgatttacacggatcatgcgtcgttacgcactgcgactcagtcgcctcatctctcgcaaaggatggctcgctggctgttcttcttcgcggagtccaacttcgaggtgaagtacaagcctggcaggcagaatgtccttgcggacgcgctgtcgcgcaggccggattatgagctggctcatgtaacgaccgtgacttcgtcattaccggatcggatccgaacggcttatgccaaggatgacacttgtgtcgcgttgctgaaggctctgacgagcaaggagtttcaagactcggacatggaattgttagcgcgcgatggaggcctgttgttctacaacaccggtcccgaggatacgccccgcgtggtcatccctcatgataaggatctcaagtatcgcatcctctatgaggcacacgacacgccactggccggccatcttggccgtgagaagatctacagctcggtgagcacccactactggtggccgaagatgtacaagtggacgagcacttatgtgcgcacgtgcgagacgtgtcagcgagtgaaggcgtcacctcatgctgcagcgccgttggcgagtttgcctgtcccttcgggcagctggcaatccatgagtatggactttgtgtttggcctgccggtagacgcggcgagcaacacaggactcgtggtcttcgtggacctactgagcaagatggctcacattgcggctgtgccggataccatcgatggtaaaggtacagcaacgttgttcttggaccgagtgttccgacaacacggactccctgagtcgattgtctcgcaccaagacccccgctttacgggcaacttctagagcgcggtctttgcggtgcttggcaccaagctggacatgtccacggcggaccacccgcagaccgatggtcagaccgagcgcgtaaatcgcgtcgtcgaggacgtgctccgcagcatttgcgccgagacgccgaagcgctggagcgccatgctgccactcgttgagtttgccttgaacaacgccgtgcacgcctcgacaggctacacgccgttctacgtgaacagcttgtctcatccccgcgtcccgctgacgccgccacgtggtggcctcgggcttggtgggggaggagaagccaatttagctgatcggctagccgatgtcagcccggctactgttcgtaaacaggttgacgctatcttgtcgacgcgtctgagtgtcttacgacatgtgcgtgacccaatggctgagagccaagacaagcaaaaggaacatgcagatgctaggggcagaggcaatgttgaaggttatgaggtcggggacctggtgctgcttaacgctaagaacctacctacacatgcagtgccagccgtcttcaagacgaagttgcgccagcgcttcatcggacccttcaaagttgtggccaagaagggccttgcgtacacgctcaatcttccgaagaagatgcggacgcaccccgtcttctacgtgggcttgctcaagccgtaccaggacccgatgcaggtgcagatggaggcaccgagggtgacgaggtcacaggcgcggagatcgcagtcgtcgaggacgcgaccatcaacatgggcaccgcaggaacaggcggaagaatcggtgccggaggtaccgcgagcacagcgagagccgcaggcgcaggaggcacagcagtcggagcctgcatgcgggccaggaggtcgagctgaccctgaagcacagcctgctgacgttgtagctccccgagctcccggccacgctgctcatcgcgatcgcgatagtatcgcacccagccctccagggccccatggcggtcccagacctctcgaggcacctcgatccatcgcgtccgctcggcgagctggtcgggttcaatggcagtccggctcagacgcgcatcaacgtcatggatgtgatcccgaaggcggcccgcctgctgccgcgcctccaagagctcatcttgagtcgcaaaggtccccacagcggcctccaccggctctgctcgatgagcatgggaatctacattaccatgtggagcgcatcctggtgaagcggcggtgccggggtcaaaaccagtatatggtgaaatggcgagggtaccctcactccgagaactcatgggagtttgaggtgcccctccgccaagactgaccagacgtcgtggacgcttttgatcagcttgatcaccagcgccccgagggctcaaggccggcacgccggccgtcccgcgcttcccggcaataagctggggagatgctgggtcagctccgaggttgaccctgagccacagcgctcactccctcgcgggaaggagcggctggagtgctcaaaggagcgaagcgcgcagcgctaaactgggtctgtggttgggcgagtgccaagaggctacgcttggctcggaccttcgcgaaatcgaagcggagcttgcgttcaatgcgaacatccacttcactgaagctggctcggagagcatccatggagctgagctttcggctgggctcggcccaagactcgaactgagcttcgtactcaattgaggcttcccccgggctaagtaccaccgggtacgtccgcacgggcacggacttctgctgggcttgcagccacagcctctcgcgatactccgcgacagtcgtagactgtggagtgaggtgccgctctcgcagagacgtacgcagtgcaagctcctccggagtacgggccgcgggcccaatggcgtgcagcgcgagagactgctggaacgcctagcgacaagcctccgcggggtcgcgaggccggaagccgtagtcggcagtgctggggttcagcagaggccgcagctcggggcgctgggagcgcatgggagccatctgcgcagcaacctactcggactgagcctcgtccaaagggttggagatgacggggcccaggggcacgtcctcgccacgaggcggtgagtaccgtggctcagtgagcgcgcgcagctcgtagagaccagacgagcgttcggggaacggattcggagtgcgcagcggtggtcgcggctcctccctcgatggcgcagtgcgctcagtggcgagacggctcggggagcgcacaggagacgtgtgcgcgggacgctcttgatcgcgacggctcggagagccacctggggccggcgagccttctgcacggcgtgtcgacggtgtgggcgaagcgtcgccacggctcggggagcgtcgcgtgggtggggacgcatctcctcggttgggagaacgctccatggactcgtccacctcgccctcttcaccaaagagttccctagggtccatgatctggcgggttggtgctcgaggagagctggggcttgcgcgctgcgagctgcgcttcaggcgttgcgccgcgaagtactcggacaccgagagcctggaaggcgtcgagggtgtgcgcgcgggcgctggcgttcgcggaggtgccgaggcacgcagtgcagcagcacgagaggaaaacgaagacgtaagtagtgagaatcggccaagggtaaacccacggcagtagggttgttaggactcggaagttacccagttgtccaatatacctcatcatcatcattcatacgatttccgtatacaactacggcaacgaagataattgtagagatattgcggccgatagctacctcgcatgatgctatcatgcaaaatacatagttttaggcctgagaggcatatgacgaacaatagcgattgagatttactacacagacgagtaacaaatgtaataggctttcatcggcttgctatttagatggtttcatatagcttggagcgacttataagaaattctaaacaagtaaacatgcatgtgtatttatcgcggactagcgtccgttcctagaaactaccgtagtaggtactgaatgtgcagcgcatgagatgcaagcggtgggcgtcctcgtgggaggtggaagggaacgtgctcttcagggggtggatacgtctcatgcaacaacgaggttaaaccattttgctgaaggtgtgccggcggcgatattagaatggcatctgaaggaacggacagtgccaaaccgtcaaagtctgtgttctgcggaggcagtccggtcacgctcatctggacaccggttacttgatcgaagctgaaggtcctggccccaatgtggttgctggcatcccaaacactcgcgctcgtcaagggtgagctatctacattatagacattggccgcatgattgtgtagaaactcctgcgcggttgagctgacaagtcaattctgctccaatggactagaatcgatcaccgaatctgtgctgggacccaccgactcgaatggagccaagggcgcgctccgtagcaggggcggaaccctggctttggggtcacgttgacaggtacggcgaatccgtcggttcttgaacttaaggtgctgacctccaacacctggaacacttaaaccgaacgcgacacggccgcagatcacgtgggcgcacgataaaacgtttgtgaagtaggggcacatgcactcgaacgtgttaattcgcactacccatccacccggcggcatacccagatggtgaacccgtcggacagacaactttacagcgaagcgataaaacgtggccgccgaccttttctcagcgtccgtcaagcagccttctgagagaattatcccactggcctgagttacaggagcctgtgaacctccaatgcccgtaacttcttcaatatggtcatcgtcgattattccatcgcctaggtactggactcgtacgatagactgctcacccgtattgaaaacagcaacacgctgcgatgaaacgaggacattcgcaagcgttttagcctcttgaggtgggggtgggcgcgcggacgtagtactaggctgaacacagattgaggtgccttccgcgatagcaagaagtttaagtataaggcgccgtgtatccatagccttgcggagcgtgaaacgcttgatacttgcgttaaaaacttcacatagattgttcgtcgttgcgaatccaccaggagaatggaagatctgccatcgccaaaatctgctactaagtcattgagaatcgaaatactcaataaaactccacagccgattgtcacctttccactcactagacacgcgagcccacaccgtcattaacttgctctgactagttgtgtagtgcatgtcaagaatgccacggtaaactactccacgaacggcatcaggtagatgccggatgcgcttccgcacgttgtacagcacgtgaaaaacacacatcaaataggtggcggcttcaaaccccgtaatagtttgaagcgcattgagctgggcggcctctgcgtcccccatgaccgcgtcaattctgagtctcgttttcatgtgcatctgaaaaaccttggagaaagttgcaatcgcctcgtagtactcgctctgtgttctttgacttacaatgaataaagcggcgagtcggtaaatgcgatgcttgtcagtgaagccacaggtaatgacagggtagccaaggtcgctcagcttgaaggtagcgtccaaatggaaaatcagaaactgttcttgaagttgaagtgcctttatcttttccataagctttagtgtcgtaattcccaaaatcaaaaaggtttgtcatcttctccattgcccacaaaagggaatccatcttgaccttcacgatttccaaaaacgaaagctgtgtcgggatctatatctgccacgaacgcctttgaccgtaccagctccgtagtgcgaacaatcgagtttttcgttccttgaagccatgtatgcttcacactgcgctgaacttgggtgtaggacgggtatcctagaactggcttaggcacgtcgggtgcgcgcagtaagttgctccagatgagccgagggggtacagcgttctcgtccatgcgatgaatgtattctttcatcttctccgtaaccttaggcctaggtggtaccgcgcattccatctctccacgaaaacgagttgctctattgctcagaatgatccactttgacgctaatgggcaatgacgaacttttcagcttgtcgggcacttcaccgtccccgtgctgctctcacaggattcgctacggcagcgcagtcggcgctcctccatatcgtgttccccagggcagatgatgcacgggcgatcccttgtggcacaaacagccgaacagcaaaaaagcttcccagcgaaatttcacgtattcatcctcattacagcactctcttagttttgtgcagtctagcggcgggggcatcgcacttgggtagggcggcaacgccgggtagcttgagaggccgcctggtgcttggtgtcgcccggaagtgtccgctgaaacgatgactgcagcggacaggcagcagtggctatggtatgacgcacctgcatcactcggcatgcgagaaaggcccttatgtctactagccgccagtaatctgtacactgatgtaccatgcggtgaggttttggatagtgttgtcgatttgtgtatgctgctgatctgttcgtgtctattgatgtacctttatctgtacattcgcgaccaagactcgtcctcgggcgtgtctgtgttcgagtacaccttcatgcggccgtgcacgtccacccacttcatcagctgcgccaagtcgccgctcaatggcaggcttctgcggctcctgctcgcacttgatcaccccgcccgtcgagtcgttcacgcggatgtagtcgccctcgtgcagcaccacctcggcgtcactcgatgtgtgcacgcgtattgtcttgctgtaggcgtcgttggaccgtgcgctgcagccgcacatacacggcttgccctagccctagctgtggctgcatgcgacgtcatgccgccgtgagacgtgagggtgcccttggccactcttctttgatcttcctcctcacctcaagcctcctaacacagttctttgaactgcgaataagagagagagatggcggcgtcaggtatccctccgtattgatagattatgacggggatggaaacacttcagccgaagtgtgggcaaacaaaaataaataacctaaaacataattgaccatttgtgatcgacgtaagtttttgcaaagattattgtcagctccaatgtcgtattccatttagctgtggtcgggacttcctgttaattggagcgattcccgtaggttttaaaaatccaaaaatcatcttaaaagtgcgaagaaaggacaggaataaatcttgtcgaccgatcacagatctgtaagaggggtaatccaccccctctttcagattttgacacgtactttctggaataaaaataagattcaaaacgctgcgggaatcgctccattatggtcaaattcctttattagatacggttcttgtcgagatcgacccttgttgctccattagggttaaacgggtattgtagagttgaacgcaaaagacgcgtttgtgagataaaccaaccccttctaaatgtgcggaggctgccaagtatccagtctgatgccaccataccagtcgcccacggagtcgagcaggtttcatttgaattagcccctagataggagttgtaggagtgtcggaccacttcatggatgtttgttttggctgttcggcttttttatcggttcaaaccacttcgattgtgaagtagttcattcggaattaatcaaaccaattgggtttggtgtgttttaggcaaggatagcttcacgtattgtactggcgagatcaaatgcaccaccaaactttgacgaagcgtatctcagcatcaaacaatcagaatgatgtgaactttgttttgttggaaagctctgcgcttcctcttttaagtaaactacgtttggacttgaagtcgcagcgaatgaatgagatatacccaaatgaaaactgactgtcccccggtttctcgaaaatatcgaggctatgtcgattgctcttttacaaactttagtactaatttattgcgcactttctgtaacgcgttttatgcacattattgcttgacgacgccgccacagccggcgagatcaacagcgcctagaacacttcctacgcggttggcgctcatgaaactacgtttgtttgatgaaccagaagccgagcttcaccctgacgtttagctttctcgatttatcatcttcgtttaggaaatatggcaaaaaatgtcgagtgcagatcagacaagcacgtctttcccgctgcagaaatcgccggatgatggataaaattaagaagtaggatactaacaccgtgcacctacattctgcatgttatgctgttttcattgctggtcttcttgcctttatacgctaagtacttttgaaattatggacaaatgaaaattttggtggtgcatttcatctcgccaatacaatagaggtgaggaggtttctgctgccttacatatatcccaaccaaagtcctacagcatgtgtggtctaaccggctgtactgtaccgtatgatctccgccaatctcatgataatatcggggcgtcgttttcaccgaatacttcgcatgaaacaggtaaatatattaataagataaggtaggtacctctgtatcacctcaactcaggggtaagcttacagtagatgtactgtacttgcttcggatatggataccacacgatgtcatgcgctcaacgttggcgatgctactttattgtaattaaaacgcaaatctttatctgttttcccgagctcacctggaccaacttagccccgaccttcacattgtggttttcacaatttgtgaaccacaaatatggaagcattactaattaatagtaccggtagtataggatggagctgtgcctaatggatttttttgcttgaccacatgggatgccagctaggatttggctattcttcggatactgtacattctctcacagtccccacgcgaccgcacgacagccatcttcagtgccgactgttgccctcgacagtcagttgaccttcagcttcagcagtaaggcacgtagaccaagaaccaagaatgcgtcgaaactgcattttgttgctgctcgttgccgtagtgtcagcagtctgtggtgcggtatcggctatcagcagtgatcagacgaagtcagccctagctaccggtagtggtgctgctcttgaagagaacaacctaggcagattactgcggagcctcgagaaagtggaggatgacgtggctgacgaagagaggggcttcctcagcgggctcaagaaggtgctcggcataaaggggaagaatcccgacttcgccaaaaagaatctgaagatggctctgaaggaccagaattcgaggaacgagctatacaagaagtgggaaggctacagcgtgggggagatcaaggccaacttgaaacacacagacatgtaccacccgcgcgagcacacactgttttacggctacctgaacaagtacaagaaggcggcggagacggtgaagcaaccggcggtggcgcaaggtaaggcaaagaaatccgtcaagttcaagctggatgaagtccaagtacgcaggttcgatgacgaagggaataaaatcgacgaaatagtgcgtctagatggcgctgcgtaataagccgcgaaagtgagcagtaaaagtatttcagtcctgcaattcattacttggtatgcgaattggttgtaccatgaatcgggtgcattgaaccacaccattcgtacacaatatgcatttgcacattaaccacccagcagctcggctgggctgcatgaccctccgcttggcccgcttgtgccgtctcccgctgcgatcgtggcgagccatgagcgctccctccaacttcaacagcgtttcctctacatccacgtctttttccagctctcaccgcccctcggagggctcaggaatcgctgaaaaccctttggcgacgaaagtccgacggcaccagagccatttaccaggcgagcagccgctcccagacgctaataaggagtcgcagagcggtggagatgacgaccgaggaggccccaggacgctggaccagctgcagctgcgggttctgtccaaggacgagcactttgtggtgctcaacaaggggccggacgagcggatggacggcgagttcgacgtgacgctcgagaaggcggtgaggcgattgttgcggctatttgagttgacgcaaaggtgctgggtacctaaaattgctatgggtcgtgtggtcgcagctggcgagggatttcccggacgtccccaaattccggtggatccaccaacttgactttggtacgctgggtggggaggttggaacggtgccgtggtcgtgatactgatgctttggttgtggtgctctccgcggtgttgttgtagcaacgtcgggtgttttggttgtgggagctacgaaagagtgagtggagggcgattagggagctgaaatttgtcaataggctgatgtttgcgttgaatggttgtattgcagagctacggcgacgggctgtaggcttttccgcgagaagcaggtgcagaaggagtatctagcggtggtgcggggccacctgccgttcaacccggcggatagcgtcgacagatcgggtgtgcctgccaaggcctgcaccttttcgaagctgggattgttgattcaagacatggaggagatggagcggctcaggaatcagcagcgcggaacgaggactcaccagaaaatggccgattacccgcgaggagctcgtcatgggccaaatctgttcacaatggagcaagcacgcttgctgcgtgaaagccaaggtggccccagaggggaggtgcgaggcgctggtgctggagctggcgctcgtgaactgacacctgcggagttggcattcacgaagatgacgtggcacgacttgacccaagaggagaaggacgcttacaccgaaaaggccaaggaagacaagcagcggttcctgcgtgagttcagcgaatttcttagcaacgaaaaggttcggctcgctcgcaagcgcaaatacgagtgtctcgatcctgacaacagcgaggaaaagaatgagcccgttgcgtacatcttcgacgcgccgatcatcgagcctcatcggagtaccggagtttttcgaatgcaggtgtgtactgacaccaacaccacagcgaagcagtccaccacgatcgcgtttgtattgggtcacgcaacgtacaagggcgacccagttaccaaggtgctgctacgccctctgaatggccgtagacaccagctgcgacttcattgtgcgcaccacggctttccgatcgcgggtgacgtcacatacggctcacaggaggacgaagcgccacgcatgatgctgcacgcctggaggatttggcttcgcggacgacctgcggaccaggtttgtgtagttaaggagatagcggtgctgaagaagttatgcgggggctgacgtgtactttgtgtttgctatggtgtagaagaagtttggcgatctgtacttcgaaagtccagatccgttcgagcctatcgtgccgagcaagcgtgaggtgtgtactatcacataccaccagcacaagcaggcagaggctgataaagcagccgcaaactcaagtgcctagacatccgagagctgtagtggctagactccagcttcgtccaactggtgaagcacactcaccacgtccacagtcgacggatgttcgggtccctgtaccgttatgtgcagcacaaggtgtgagcgttgccagcgcatggtgtaacccgtgaatagcagagtaatagagcaaactcaccagtgcgtcgacgtagatgtccagtgcctgcttcacgaaggccttcgcctggccgtgatcgcccaggaagaggaacagcagccccagtgtgtacagcacctcgcctgtagcaacgtgtttcgctcccagcaagttctggcggatattgacgatctgctgcagcatggagctggcttcctggatccgtagacgctggtgctccagcatccaggcggccgtgtcctccggcgggttggtcaggaagcggtaccagatatccaccaccttgtcgagcatggccagcgcgctatcgttctgctggttgcgctgctgcaactcgcgttggtgttgtggtgactcctgctgaccttgagcttgagcttgagcttgggcttgttgctgccgtaccgcagcacgctgcatccggtggaaggccaggccgaggcagaagtagagctccgaggtgtacaggtggtcagggccgaagagtagcgagcagtgataagctccgtgtgccgctcgctgtaagctttcggagaacgcgccgtactccaagtgcagcaggctgtagagcttgttcatgcggatcacgaagagattcttcatctcttcgggcagctcaggcagagacaccgccgcccccaagaggatccctgaagaaatggtgtcggggccagccttgcgatccttgaccagcagccaattcacgagcgacaggacctcctcagctggcttgagctgcctctctcgaagcgagatgtcgaccaggacgaggtaaaagggcacgaggcgcagcgagttcttcccgtaagtctcggtggccatcttcagcgcggccaccgccttcccgtgagctggtttgagctgcctcaggaagcacaactcttcgctctcacggcgcatctgctcacattgctcatgagctgtaggtgaactctccgaggtgtcgacgactgcagcatgccgctgaggacagcgaggaacagtcgaagccatggatacgaccaagcgtcgggctgacttaagtcgcaacgactctccattttttcttggaattcggtgcttcactcacgaataaaaagtcacgattgatgggcatggcaacaatcggtaaaaaagataaacgcgtagaactctagttcaacctatagaccttcaggtcttcttacgattgtagcaaggagatcgcgaggatctacgccgggatcgctgctgcatttgctgcaggggctgacctatgttttgtgtcttggccccgcgagctggggtactcgctggccaattcgactgcgtcttcttcgacgactaaccgcaagtgaaggtggggccggtgagtctcttaactagtagttaggtagacagggaactgtgtcacgctaaggggtctttaattttatttctaggtagatcgcgctgctctgacgaccgcagatggtgcgtatcaacagtttgttctaacgtcttactaaattacggtaattggtaggtttctgcccattaagccgaacgattttgctttgcatcaaccgattcgcatagagagcgggtagaaactaaagataaaagcagtgtttctacagagggtgcttcaaaactacagagggcactaccagtcctacagagaggtggtgcaggaatacagaattgcactactaaatacagacgtgccaagctgacgacttttgattggctttgtaacggggttacatggaatagtgaccctgtcactattccgggatggctgcatcggtcactccactggatagtgacccaagtggcctcagagccaacagatacattttgtatgacacaaactatagggaacttaggatttgtatgcaggccaaatctgtacagcctataaatacattcagtcttagatctgcctacagaccagggacacgtgaacggctgttcacttggagtttgtatactcctgcttcctctgttaagaagtgctgtgtgccccgtcacacttggtagcacttgtagtcaatcctacgccttcgcgggtagattggactacctgaatcctctgtggtctcatcgagtgagccaagatggatcgtacggagtttctccatctgaacgactcgcagttcgagtccgttcgtaagatggcaggcatctttgggacagatgccctgcgtagcttagcggcggcgacgccggctgagcaggttgagcgtatcaacgcgttcgacacctacgagcgagggctcatcgcccacgttcaagggctgcaggccactgcggccgcgccgaagccggtgcaaccgaagcccctgcggctgaaggttcaccccttcgaagggaaggaaggagaaaaccttcacttctgggttcgagaggttgagctcgcgatggacgcggctctcgtctcggacgagcgactccgtgtcgcctttgcgctctccaaccttagtggtcgcgctaagagttgggcgtatacgcgcgaagcgacgacgcctggatgcttcgcatcatggtctcagctgtgcgagcagctgcgggccgcgtttcttccggcgaactacgagtaccggcagcgttcgcgcttcctcgcctgcaaacaaggaaggcgggagctgcatgagtacatccaggagatgcgagtgctcactgcctctttggtggagaaccccctgcctgaacacatcaaggtgaccgtgttcatggacggtctgcgtgtcggtcctgcccgcacgcaactgttccgtgtgcaagcaaacactatggaggaggcgattcagatcgccctccaggaggagtacagccacaagcaggctcgtacccccgccacggtatggcagagcaaccctgcctctggcggtgcgcctaatggtaactccggcaatggagcgatccacgggccggttcccatggatctgggcatggccgagcagagcgacattcgctgctacgactgtggcaagcttgggcacatgaaacgtgcttgtcccgcgggaggactgaagaagaagttctcttcgaagccctttggctctaggggtcgctggcagaagccgcacccaaggaaccaggggaacgccggacaccagtaggggcggggcgccctactggggaaacactaagacttcatgaggggcgtgcgggtggcgcacgccatggggacttagcccctgagaggctctgtactctcgaagcggagaagggcagcggtgggctgcttgtggtgcacgcgagtgtaccgggatacgatcatcccttgagaatcttgatggactctggggcgtccaacaactttgcgcgccgccagactgtcgcacgcaatcgcgacaagtacgccgatgcgctacgaggcagtaaaggcaacggactggtctcggtaagactggccgacggtacggtggtagaagtacctcgggtccacatggacctcactggtaagttagaggacttcgacagcacggagccgttcttggtcctagacatggacaagtacgacttgatccttggcatgccgtggctggagaaacacgagccttggatcgactggcgcggcaaggccatcgggtccagccatcccccacgctctgacagagctttggtgagtcatgttcccacctctggtagcagctggggcgcccgcgagggccgccagggcgcagcagcgtctaatgagttcttggggtccgtcgagactgacgacgactccgaccgggccggacaaggcctgagagtggaggtgccggacagcacctaccaggtgggtaacgtaggtctacacacgggtaacgaagtaccgcaggcagcaagggctgctggagaaggcgccgctggcgttggcgtaggtaaccatgttccacgcgcggtcactcagaccgtaactgatgaggaaggcactgcaggcgcttctgatgtgggtaacataggcccacaggaggtcactcagaccataactgatgcgggagccgctggaagcgctcctggtgtgggtaaccaagttccacacggcgaggtgggtaacatagttccacccagcaaggcgggtaaccaagttccgctcaagaacaaggcgggtaaccaagttccgctcaaggacaaggcgggtaacgtagttccgcacgagatcgagaagatcggtggtgccgtcaaggcggcgccacgagacgaagatacccgagggtcacgtcgtaagccgggcctagtcgtgtggccgacgacgccagtcgccagcgactccgagcctccagccaaggctccagccgccgaagagtgttatcacatcttcgacggcgtgaccggtcgtcgggtcaagacaggagctgtcgagcttacagctctgcccgaggtttcagagttgctgaaccttgaggagctcgccatggaggacttcttggccgagctaaaggccggggagatcgcagagttggttctcctccgaccggattccacgtcggccgcgttgaactcgtcctcggtcatggaccaggcagtcctggaggagttccagagacagcgcccgtcgcgcatggactctgagattcttaagaacccccgggacccggtgtaccccttggtgaaggagttcgaggacgtggtgtccaaggatccaccgtccaatctccctccggacaggggaatcaggcacgagatcgatctcgtgccgggcacgaagtactgtgtcacgaggcaatgggctcttccccgggagcagtgtgaagtcattgatgccttctttgccgccaaggcgaaggcaggcatggtgcgggagtcgaagtccccgcactcgacgcctaccttctgtgttcgcaaaccgaacggaatgtggcgtctggttcatgcttataacaagctgaacagcgcgacagtgcctgcgcagacaccgatcccgcgcaaggacgtgttgctcaacaacatggccggctgcacgctgtatagcgcgctggacctggtggacggatactatgcgcgagagcgacatcccactcacggctgtgagcacgccgagcggtatgctctgggagtggctggtcatgcctcaggggctttctaacgccccggcaacgttcaatcgcttggtcacacaactgttccgacctttgcgtgcgttcacacagtcgtactttgacggcatcctcgtccacagccgtgccgaggcaggccagacggccatggaggtgatctccagcaccttcgacgtgtgttcgaagtcatgcgggcgaacaagctgtacgccaacatcgacaagtgtgtgttcgcagctgaggagatcaaggtcctgggctgcttcgtcagcagcgccggggtccgggcggacccggagaaggtgaaaaccatcgcggcttggccgccacctcggtcgcagaaggacctacgacagtggttgggcctcgccaactacctgcacaagtatagtgcaggctacgccgagctggcacggcccttgtcggatctcctgaagaaggatgtcgactggcgctgggagcgtcgccatcaagatgcttttaacgacatcaaagcgagcttacagcgcgcgccagtcctggcattgccggacgagacgaagcctttcagcgtagtctgtgatgcgtctaactacgcaattggctgtgcgctattgcaggccgacgatgaaggccgcgaacgggtcatctcgttccagtccaggcagctcaaggcagccgaacggaactgtccagtccacgacaaggagctacttgccatgaagtacgctcttgtcaagttccgagtgcacctcctgggctcgacgccctttgtcgtttatacagaccacgcgtccttgcggactgccgtcaacacgccgcatctctcacagcggatggcgcgttggctgtcattcttcgcggaatacaacttccgtgtcgagtacaagccgggcaagttgaacgtgcttgccgacgcgctgtcgcgccgacccgactacgagcttgctcatattagtcgggtcacgacggatctgtatgatcgcatcaggctggggtaccgagacgatgccagtctcggacctcttgtgcggttcttggccgctggctccgaagccaaggccgagtggctcacgccccgacaacgtgcaaggctgcaccgctatgagtgggttgacggtttgctccactatagggtcgagcccgaggatcctacccgtattgtcgtgcccaacgactaggatctcaagtacgacatcctgatggaggcgctcgacgctccatccagtggccatctcggccgtgagaagacgcacgcgtctgtctcgcagatgttttggtggcgtcacatgtacaagtgggtcgccacctacgtccgtacgtgcgagacgtaccagcgcgtgaagcctgccggtcacgcctcggcaccattgcagagcctgctggtcccagcggactgctggaagtcgatgagtctcgactttgtcttcggacttccggccgatgaccgtggcaacactggtgttgttgccttcgtgtgccgtctgagcaagatggtccacattgctccagttcgtgacaccgtcactggcgacgaggtcgctcgcctgttcatggactgtgtcttccgacaccacggtttgcccgagaccattgtttctgatcgagacccgcggttcaccgctacgttctggcagacgctgtttcgccttctcggcacacgactgtcgatgtcgacggcggaccacccgcagacggatggccagacggagcgcgtcaatcgcgtgctcgaagacacgctctgcagtatctgcgcggagatgccccgctcttgggctgatcgcttgcccatggttgagttcgcactcaacaatgcggtacatgcatcgacgggctttacgcccttttacctgaacgggttgcgccaccctcaggtgccgctcacattacgaggcagtaccggggcttcggtcctaagtgggggagaggctcggaaaaccttttcctcccaagtctcggacgtgagtccagccaccttgcggaagcaactgtcctcgtttgccgaagacagtctgaacataatcagcagggtgcgagacaccatggcgcaagcccaagataaacagaaggagtactctgaccgaaatggaagaggaaacatgaacgtgtttaaggttggggatatagttctcctagatactagaaacctaccgctaaacactgttagctcggtcgagagcaacaagctgaagcaccgcttcattggacccttcacggtcctcagccggcatggcgcggcgtacaccatagacttgcccaagtcgatgacgactcacccgacgttttacgtgggtcgtgttaagaggtatcatgaccctctggctctggctgccccgcaggaagcggtgggtggcccggtggagaagagcgcagctcctcgaagcgcggcgtcgagtcgcggtaaggcgcctgatacgcgcgctggtcgtaagatggcgcggcgtacatcggagcagcatacgcaggggccccgtacgagccctggccaaactgggtctgatacgagtggggctgctgctgctccggatacggcgcgtggccatgaagctcggcccgaaggccagcgagctggtttcgcagcgagtcgtaagacgacaggtcggctcgacgatccacacggccatggagactgcgagtttcttgatagagcgaggcaacattctcacggagccgctccacggcaccaggctgaccagcacgagcggcagcctcgccaccaagaccgacaccaagcgcgatctcgaggacgtacacacagtaccggagaagacgaatctcctcttgctgcaggaccaccacctaactcggggccccagcatacggctgcgtcgcctcagactcgtagccatggccgtgtgaggccaccgccggtcctccttgatcgtaatgggcagatccactaccacgtggaacgagtcgtccgggagcggcggctccatggcaagcgccagctgctcgtgaagtggaggggttaccctgagtcggataactcgtgggagcccgttgagcagctccaggcagactgcccgaaggctgttgcgatatgggacgagaagcagcggcagcttcgtaagtagtccttggcttcttggccggtacccggggcacggtagcagacgtagtcgcaccacgccctcgctcttcacgagctttggctctcgcctcttgcttcagctcggtcatcttcgggcggagcatgcgctagctcacgtattgagcgaactcgatgcggagctcgcgggtccaggatagcggacagagtgcgatcctcacggagttctttgaactcttggtcggaataccctttgcgctggacgtagcgccagaagaggtcttccaccacgctccaggtcatgttgtcattcggcttgacccagtggaaaccccacacaggatggagtccacccttgtccttcggcttcttgcgaagcgtggtgaactccttcagtgtgagcttgtgtggtgctagtagcacacaccgggcgacttcaacgtcgccaagaaagagtggctctttctcaacaagagcacgctcataggaacccctcgaggtgtacccgccgataaggccacgaggagccgagagcttctccaacagcgctggcgcaccagtgccaggctcgggcgggaagtagccctgcgggaacgtggcatccccgcctgaagaagactcgatggcagtcgtggcagtcggctgcctggcatacgcacccgagctagcagcgtggtattgctgctgctgctcgtcgaggttgttggagagctccttgggctcgtggacggcaccctcctcgtcctcagactccgagtcgatgaacagcttggagctggagccgcgaggcgacctggaagctgaacgcttcttcgccttggcctcggcggccttcgcagcggcagccgctttcgatgcttgggcacgctcacgaccttgtgccagcgtcagatgcttggatgccagcacctccttgggcttggagcccgcgtcgctcggcgacttctcggccacgaccccagcgtcggccatggcgacttcgtcgtgcgactgcttgctgtcgcctgagccggactcggcgtcctccgcatccttctctgacgaggcctttgcgtcggccgagacgttggtcatgtcgcctgccgccagctccgtgccttcggcagcgtgcgtgctacgttctcgtcgtcgggtgaactctcaccggagtactggaccatcgtgcagtcaaagacggcggcttcccagtcgcgagccgggcttttatggccccgaggactctcctccttgccttgcgcggcgtcaggagacttgctccgagccccggcctaacggccactctccggcgtgctgctacgtgagcgcaccacctcctcggccgccttcgtggcctccatcagcgcggacgactcgtccttggccttggccgccctggtcttcggccctacggcttgcggtttcggaggtgctttcgcactgcgcgcactgcgctttggaggcatgcttccggtcgacgtggagaccctgcggcttgctcggcgatgcgccagttgctctgtgaggcccgggggccgatgcgccagagctcgcgccgttgtcgatggatttcgactttgcgagtgaaatgtgagtcgccggcgtaacctcgctctgattggtcgataagatcgaatctaagtgggggaggatgtaacggggttacatggaatagtgaccctgtcactattccgggatggctgcatcggtcactcccctggatagtgacccaagtggcctcagagccaacagatacattttgtatgacacaaactatagggaacttaagaattgtatgcaggccaaatctgtaccaacctataaacacattcagtcttagatctaccgcttttcaagtcaagccgtccccttcagaccagggacacgtgaacggctgttcacttggagtttgtatactcctgcttcctctgttaagaagtgttgtgccccgtcacaggtttcgacccacaatattcctaatggtgcttcacctgattgtttgtatctactggcactgctgacgccgaaatcttcattagcccaaacacattttggaccgaggaaagatcttttaacaggaagaagtgctgtcttgggggagggcgtgcggaactaagagtgccgcccccgcactgcggggcccgcagttcaggcggatggaagcttcgcgaagcctccacagccgccctacatctgcatatatatattaacttggtttcactatacctacggtgagtcgtacctacactgacctcctattggcttacctgtctaccaatcagatacactcaccccttctctggctgcgcgcccttccgacttgtcattcccgaaaaagacagagagctgcgacgcgtccggctgtcgcctgaggaattagtccgacctcgcttctccttcgcctcggcctggttgttggaggcttggattggttccttgggccgatggttgtatcgctagcggtttctactgctgccggaatgcactctcctgcttccgcgcgttctgcctcacctccagcgacggccgatcatgatgttgaggctccgccgtctgcgtcgcctctggcgaccgcaaatctcgatgtccgtccatgcttccacctggcgccgccacgccggtcgcgccggcagactctgaatgcgccgccgcgctcgcgcagattgtcgatgttgtggccgctgctggtgaagacagcgatgctgactccggtcttgacgaagagatggtgcgtgtgtgggaagaattagagctcaccagtcgctctcccggtcttggctctccagattcgggctcggcgcccccggcgccgccgcctgcgtcgccagcgccgcgtgaggttgttgcttcggctggtggtttttctccatctacgcgcctccaggagttgatcttcatgctcgatgtggaggggttgtctgtcgaggaggcgatagctgctgagcctgcgcttggggcgacatttgaggcctcgcctgaagatgaatccgggcttttcgatgatagtgacgacgatgaaggcctgcctcaggttgaccgctcgcgcttgcgtcgcggtgatgagacttcgacgtgacatccgatgcggcttcctccggcgcccaagaagcacccgtcgaacaaccgcaagaaccactacgacccgaagaagccttgggattacaacactgaggttgacatcgtccgtgccttggatgtcaggggcaaggctccgcaccgttgctacgtggtggaatgggaaggcaatccgctacagctaagctgggtctggatggagcagctcgacaaaccgtcgacgcgctacatgatgaggatggtggacgcttggaaggaatcgggagacaggcgcaccttctgttattggtactcggagcgtgattccacgtcggaggctggtacttgtttcatggatgctttccgctcggccttgtactatctcggacagccggatctggtcacaatggagatgtgggatgcacgcgacctgaagccatccagtacggtgtgtctcgcgacgacgtgacggagttcttcaaggttctgcagcgcaagagtgtgccactgaactacgacgtccttctccgaaacgctcttccagagtcaagtgccaacatcacgacgctccaagatgtttgccgcaaacaagcacccggtgtttacgtcatcagcgctggccgcaatgatgtcgggcactgatttgtcatggttaaccgtggtccggagaagcaacttctggctcttgacaatttcaatgcccgcaagaacccgccggtagacgttcttcctctgagttaccagcagtggattcagcacgtgaaatggatggtgcaagtggagctgcaaccaggatacaagtgtcgccacggcaagccaagtcgaagacacagaaaaagcgggagaagcgcatgaaacagcaggttctgcaacaagagggaatgtaatacgggattacatgtaggcctttgagccccccttcagcggatcctgcttcaccgttttcgacgcttttttcgccttgcagattcaaattccgcgatgagatctgggacttgcgacaagttctccactggttcccaggtttgtttctcctcgcccacccactccacaagatattggatccgctgttttcgcgttcgctttccacgtaatgccttgacgatctggccaatgctgccgtccgctaagattacgtcgcttggcctcgacaagcgagtcggctccttgtacggcttcaatgacgcagtgttgaagacgggatgcagcttgttgccagcctggatgttgagctcgtacgcgtggttatgaatcttccgcaccacggtgtacggtccaatccacttgggtccgcacttggtggagttgggcaagccggagtgcttcgggtccagattcttcgtgctcaagtagatcctgtcaccaacttcgaagatctgcttaacactgtttcggtcgtagacgtcgcgcatccgttcttgggcctgagctaacgcttcgcgacagcgtaaaagaatcgccgcctgtcgctcgtgaaactctgctccgggtcgactcttgggaacactctcaagttgctcggatgcaagttgaagtggattcagcggaatgtagcccagctcgtttattttacgaacggcgcaagcttcgtgctggagttgacagtcgagttgacagcgaactcagcgttggcgagatggacgtcccagtcatcttgtagtggaccgacgaagcaccgaagatactcttcccaggttcggttcatgcgctccgtttgtccgtcaccttgagcgcgatgtgcaacggtcatgtttagcttcgtcccgatggacttgaagacatgctgccagaaggtggacatgaacttcctgtcgcggtcggagacgatattcgtcggcatgccgtgtaacttccagatgttgtcgatgaagagtcgagcaacaccttcggcgttcaccttcttggtggttggcacgaaataacaccgcttggtcaaccgatcgacgacgacccaaatagagtcgacgtcccgctccgttcgcggcagatcagtgatgaagtccatggagatggatctccaacgttcgtctggaatgctgagtggctcgagcaacccaggaggtttcgtcaaccgcggcttgttcctccgacaaggctcgcagtcggcgataaacttctggatggacttcaacatctttgaccagtaccaatggcgcgccagtgtcaagtacgtacgttccgcaccgggatggcctccgtagttggtgtcgtggcactcgctgataattgtctgtcgcaacttcacatcgttgggcacgacaatccgtggagcgtcatctgcaggtgtttgataccacagtaacccgttcgcttcggaatagcagcggtatttcttgtgctgctggtgttcgcgctttggttttgagtcggatttgcgtcgcttgattgctgtcaagattgcttggacatcacgatctttcttgtacgctttcttgatgcgcgtaatcagctccgagtcacacgttacttcgctgatcgcgagacggaaggatgtgtcgtcgaagctggtcacccgtaagtcgtggaagaactttgtctccggctgtaagtctgaccttcgactcaacgcgtctgcgatgccgttcttcgccccgggaaggtacgagaacgtcggctggtattccgcaaggatgtcgtaccagcgagcgagccgacggttggccatcttctgggtgaacagcccttcaagacttttgtgatctgtctcgacgatgggtggtttgtccaggcagtagatccgaaacgctgccagcgcatgaacgatcgctagtagctcctgctgctgagtcggatagttgagctccgccgacttcatctttcggcttgtgtacgctatcgggcgctcaactccgtccaccacttgaaaaaggactccaccgacagcaaacttgcttgcgtcggtacgcagatgcatggggctgctgaaatatggcaagtgcaatactagcgggttgcacaggcgccgcttcaactccttgaagttcttcagctgctcgtcgctgagatgaatcttggcgttccgcttgttcttcttcttcaagagcgcaaacatggaggctgtcagagatgcgtactctggacagaatcgctggacgtaacctgtcaagccaaggaagctgcgaagctcttcttgcgtccgtggtacaggccagtccttgatggtctgtaccttgtctggatccatccgaactccatttcgccctacaaaatctccgagacacgggatctcgtcggagcagaagacacacttggacagcttgacgtacaacttgttatcacgcaagatgtcaagtgttttccgcggagcgcccagatggtcctcgatcttcgttgacttggtgaaaacatagatgtcatcgtagaacgacttcgtgttcttcaagtctcgaaagagcttcgatgtcaatctgtgcatcgttgctggcgcgttgcaaactcccattggaagaacgagatactcccagagaccgttcggcgcttggaatgcggtaaacttgatgtcttcttcccgcatgtgcacttggtagtacgcggacaccaggtccatcgtggagaaccagtacgcaccagacatggcgtcaaggatgtcttccttcctcgtcatcgggatactttgacgcacagtgttcgaattcaagtaccggtagtcgtgaacaattctccagccaactggtttccggacacagaatgttggggctgcgtggggactgatgcttggtcgaatgagcttcttcttcaccatgtcttcgacccagcgcaagatttcacgctgctgctccggcgactgtcgccactgctgccggtacatcgccatatttggatccttcacatcgatccggtgttcgatgtcacgcttctctggtaaaccttcgggtagctctggacgaaacacgttgtccttatactccatgagaagattgaaagctggattctctcggaaggtgtcccagtctgtctccagatagcgttgtgctttcgcactcccaacgttgtcgggctgatctcggcgttgcagtgaacgtgcaacttgcttgatcgtctcgttcgacagcaccaacatgaagtcgggctcgtcgctcgtgttggtcttgattctcaggaacttctgcaacttcttgcgcgtgatgtatttggtctgtacaccactctcgtcgacaactcccatcgtgaacatcttctccacggcgttgtctccacccctggtactgctgcttccatcagcctcgactacagtactctcgcgctcagacgtcgcaacgtcgtcgtctccagctgaactcttgccagtttgcgcgtcatcatgtcgttcgcggacaacacttggggatttcttctgcactgcgtcaccaacagcttcaaccgtgagcttcacatccgtttccagcgcggcacctcgacaggaatcgggtcttttcgccgacaggcctttcgcctcgacagatctccgaagcccggaggtaatcaccggtccgccttcctcgatcggctcacaggtcttccctgttcgcttccagtgcagagtcctcgttctcgttccttcgattcgtcgacctctccagtcaatctggggttgcatgtcttcgaagaatggtattccaagaatgcaatcgaattcgtctggaatcgggtagacgactgccacacacttgtaggcgtcgtccagcctcgagaccagaatctctatcggcagaacttcaagctccgcctcgacaatttggttgtctcccagcttgacacgaatgttcttgtcgctgaacttggttgtctgaagctggtgctcctcgacccaacgcttggatacgtagatcgtggtggctccacagtccaacaacatgcatcgtgtcgcgagacacttgtcaccaacactgatttcacccgttacggagaacagtggacgtgacttgtagaccagagggttttcgcacagaacgttcaagctgatattctcaatctttagtgttccggttacgctctcgcccacgccaggaccctcattcactgacgtggttgcccgtttccctgcttctcttgctccttcttccagacgaagcagtcggccttgatgtggccaggcctcttgcagtgatagcaggtgcggccttcagggcgcttggagtcagacctcggcttgaaccgccccttgccacggaagagcttccctttgaatggctagtcttgcttgggagcttggtcagcggagatcttcctcttgtcttggcgggactggcggtcgcgcacgtcgtccacaaagtgcgtaacttcgtacttgatcgccaggtccatagccgcgctcagcgtctctgggttcttgatcttgacgtagctacgggtacgaggcttgagaccgtttgcgtagcttagcacctggtcaagtacactcatgccctcaactcggaagataagagcagagtactcgctgttgtaggtctcgatgtccgccgtttgcttgagtcgctgcagcttctctcgcaagacggccttgtagttcgaatcttcgaagtgttggaacacatgctcacggaaaatcccccacgtgtgctcctcacttctcgtcgtcgatgaccagtgcaggaaccatcctgaggccggcttttccatcgccgacccggcgattccctgcagatgcgcgctcgcgtcttcgatttggattccgttgatgcgacaggcgttctcgatctggaacagccattcgcgaacgtcttccccccgcttgccggtgaacttgggcagattggtgggcactcgtgtgcgctctgccatcgcttgattcagccggtcgatctcggctcgtagctgggcgttcgtcggcatgggcttcttgtagtcaggttgctgggaccaacaagtgctaccagtttaacaggaagaagtgctgtcttgggggagggcgtgcggaactaagagtgccgcccccgcactgcggggcccgcagttcaggcggatggaagcttcgcgaagcctccacagccgccctacatctgcatatatatattaacttggtttcactatacctacggtgagtcgtacctacactgacctcctattggcttacctttctaccaatcagatacagatctactgtttggtaatgcctataacaggtcatgaaacgatttggtcacgtgacttacactagtgctaggtatgagaaaccactcgagcacactttccatcgaggaaggatcactttagggaaagccacaccctccatgagatctagtagctgtcctgaagctcctagaactgggttgggccaaattgggggcttctacactgaaaacggacgaaaaagcgatgttttgtgacgtgaccaaatcgcgtgaccaaatcgcttcatgacctgtaatagattgtcccctgctgtttggaatccgtccctacagccttttagatacgtcgctcctggtgtttgcccatgccgaccacactcatcattcgggaggcacgtagaaaaggccgattcaatattttgcctaggcccgaatttcaaatccagctcttttgagcatatcgagctggatcacattttgggtgtttcagattgcaaacgagctggatatccggctgtatttagcctaaaacaactggattgggtgcaagtcgaacacggttctactatgccacatcactcgtacacactattcattcgcacatgaaccaccagcacctcggctgggctgcatgtccctccgcttgaacgtcagtagcgtttcctcggcatccatatatttttctagttctcagcctctcggagggctccggaatcgcctaacaaaagtcacaacgactctccattttctcggaaatcggtacttcttcactgacaaaaagtcacgattgatggacatggcaacaatcgacaagatgaacgtgtagagctcaacttctattgccacgcttactctaaacaacatgccattgaataggcgtcgaattgggcaagccctggtctcactcttggtgctctactgtgtgtctttggtgataatatgggttaagtgggcagagatggaggatccaggcatttcactaaatgaggatgacttccacgggtttgacgatggcctcgatggggaagacgagagcagtgactaccctcgccaagcgtggaggaaggaggagttcaggtgtcttggctgggtggcgacggatgacgacggtgatgaactggggttgaggaggggatgctggcagcgtattcaagctggtgatgccgggtactgtgaggtgcaaaatactacctcaggcgaagttttccacgtgatgcacacgaccagcctctcgttgaaggacgacgctcggttcacgtgcgagctggcgaaggaattctcttcttttcagttccatgcttccgcatatcgccacgatccccccatggcgatcgtccaacccaacacacaagggattgtcatggctgtgtacgacagcgtgctacccagtgcgttcgcgagtattcgtcgtctacgggacactggatgtaagcttccagtcgagctctggttccgatacgatgaactctcaccagaaaatccggtgctagcgctgctcattgaaaacttcgggcccgtccacttgcggcggatattcgatgagcgcatctacggcttcaacgtgaaggtgcatgcgttgtactactcgcagttcacgagcgttctgctactggacgccgacaacttcgctgtgaaagacccaacgccgctgttcacgtcgtccgcgatgaaaacgttcagcgccgtgttttggcccgacttctggagtcccggaaactcgatcttcaatcttcacgcgcagagtttggtgtgggagttgttgggtcttgactacgtggaaatgctagagcaggagagcggccaggtgctagttaaccgcgccatgagcaggcccatgcttgagcaactgctctactacgcgacgcatcgacccaatctgttcacgaagctgaaacttgtatggggcgacaaggatctgttccgcttggcttggctgcaaacaaagcaaaaattcttctacaacgaccgccgcatgccaggaacgcttggtatcgtcaaccaggaccgtcagcgatactgcggagtgacgatggtgcagtacgatctggatggagacagtatgctcttctggcaccgcaacacgatcaaactaagcggtcgcggcgatgacagacaggtctggtatgccttacaagagctcgacccccttgacgacggctatccgacccccaaaatccagtcatacaacggcgaaaggatcttcaatgaaacctcatgcttcggcgtcaagcgcctcgggataaacacacgtgttcagatgaagcgcgtcgatgaacttggtgctgaattagcctttttggaaagcaagctgattcaatatgcacgccaggcatatcaactacttgatgatgaggcctcagcgctagagtttcttaatggcctcgaattcgcttgatcggtgatcaattacttgtcggatgctttcagggaactccaggtcgaaaaatggctccacggttagaaatgccgcttgttttagccgagagctgtactggagaaaatttgcagccgcttgctcccgactactgcaatacgaagaagagtcgctgccgcaccgttgagcttgaagggcgatgtggttgtagactaaggattgcacgtagctaacttcctttaatctccgcaagttttgcaccgacgagaacatttttgcgcttgtgttgagcatttcaatggccttcgctgccgcagaagctggttccttcgctccctccttggaacgcttgatgcttgctaccatcgtcttagccagcacgagcaaacactctccacgcagttgaacgcttccatgttccatcaccagaggcatttggtcgtcgatgagtgcgtgtgcatcctgcagcttccccattgcaatataaatctcagccatgacaacgtgagcctctgccagtagcagatcaaaatggtgccccctacaaatgtcgatgcatttcatcagagcattcaggggtgcaaatggcgcatggggtgcagatgcttgaaaacgcgttcggcttgctgcaatcagcacttgggcgtgcaggtacgcaaacccatgctcattacacgtaacttctgcgttctcaagcaactcaaggcttcgcggatagttacccatagccgccaataggtctgccttcagcataagcgccgccagatacgcagaaaaatcttttccttctggggagagcgcaagtatcgcgtctaaatgaacttccgcgcgcgaaaattccccgcgatgaagcacccacgaaaagaagaggtgatggagcgtcctctggtacgccatatcgttaagcaagtagcgccgaccgaaagcctgatgtccacccacagcaacgtcagcaaggaagttgagtgctagcgcataagcgttttcttcggactgcatctgcacgagtttggatattgccatttggctcacggtcagtgcaacttcaccggtgctagcagagtcttcgtaacacaggagatgcatgcgactaaatatttgttccagagagcggtgaccgaagaggctccagccagcggctgatgagatcgtaactttcccacttaatttccagacggtgtcgagaatcgcctccgtagactttatccaatccattccgcttccgccagaccggtcaggtgcgtcaccccctgagcctgcggccgcttgagcctgtaaaacaatcatcgtgcgcgtaccattgttggacaaactagctgctggggtcgctattaatgcgacagattgcatcgcttcatgaagacgcgaccaaatgtgcagcgggcgaggtgcaggtgtctgcgcagcaaacatgtgcgggacaaactgagttgctgaccccacagactcaggatggtcggtgcgtccacgcgtcaagtcactctccacctccgtcagtgttgccaacacttgcagcgcaggaaggcgcaactcctgagcgcggttcaaacagctactgactagctgcaataccgcatctttgggcttaccgatcttctggttgatacgaatcagccatgccagtgcaaatgccacgcagatgtggtcaccgtgatgttgagctactcgaattgcctcctggatactttcttgggcagcattgtagtgatcaaatataatctgcagtcccgccaagttcagcgcggcatactggataccgcttcctcggaaatgcaagttagcacctgccgaacccgacgacgtggacccaacaccatcgctagctccattgacgctcgagcgagattcttggtgaggcgacagcacgtcgtggtactggtgcaaagtgtcgagggccccttgataatcacgttcatgaagatatgataaatacttcacgtaaagcacgttcgggttcgaacagtccatcttcttgcgaagtacttggagctcatcttcagtactttgatctccatcggtccgttgcgaagcttggtgttggttccttggcctcccttccatctcgtgagccatgtcgttcagtatataactcaactggtcattcgaccacactgcagggtcgtccacttctcgaacagcttctgcagtcatcaacttctcggccaaaatctgcggatccactattgtcggtgcaggagtcatcaaattatctgccgacggcacggtacgtgacggcgttgcactgcccgagtggatcggcgacagcagcaggtcgtcatcctccatcttgctttcgttccacatgtgttgcgacgctggcgatgcgatcaggtcgaggttggtatccttctgctccattgctttgtcagccttcttttctttctccatgtcttctcggaactgctccagatactgctgtacgtcgtcgaacagtctcgaaaggccgtcgaacagcaggcggttgaccgccagcaggaagctgcgcacgaagacgcccagcagactcgtgcggacgagcgtggagctggtggagtccacgtccgcgtcctctccgtcctccctcgagctggcgagcggcgccacgcactcggagatctgctccaccgtgttcatcacggcgtcggggctttcgatcttgctcaggatgctcacgagctgccacgagagctgctcgaagtccttcgcactgtctaaactaatctccaagcgtcgcaataaactcttgagggtcgtgaagcccgcgctctgattggcggaaattgggtgctggatctcgcgccgcaggaagcgcgccaaggcgttcagcgtcgtcctgctgaccgtcggcgcggcgggcggcgcgtgcggcgcgtccacgagcgaagccaccgagtcctcgccggcgccgccccggctcgcgtcctgctgctgctgccgcacatactcggagacgaggagacaaacactcagcacgtacgcgttggccttccacttgcacattttgtgcggaaaatatctaatgtcactaaatgatgataatcatgtcactatatcgagagttgaagtgcatcaatagttggtacagtgtaccactaaaagcaatatttgatggagcaagcgcctccgacgacgctgctggcggtgacgctgctccaagccgcagctcggcggcatcgactacgtggttaatactgtctcggcgtttgcggactcttcggtggagctgccgcttgcaaaggcgtgcgcgtttgggtcgctgaggctgctggaccgcatctggaaaagtgccgtcgaccacgagcccgctggcaactcgtactggtccgtcaggaggctgttgcgctatgaatcgctgtataaagacttacagttctcgctgtctctggtggcagcgatcaagatgagcagtctcgagctcgttcagtggcttttcgagcgctttcctgactgcggggtgaagcggagcgtggtatacgaggtttcggcggcgggggcgttggatattctgcgatacttccgagagcacgggcgtacaatccccgctgcagtggaagagcgacatggagaatgggacgagactaggggctgctggggaggacgtcgccgggttcactggggaggggtcgatgcagctcgcgcagcttcagcaggacacagaagtcttcaagtggatgtatcgagagacagctgacgcgcttagagacgactatgctgcggtaagtgctgctgttgccgctggagatgtggcgctggcgcagtggcttgtagatactgctgatgtggaacccaatcaccccgccgaacctcaaggtgctgctgcgggtgggcatgtcgatcctctgcagtggctgcacgatcggggcaagtatttgcagtacagtactggcgttttagtattagcagctcaagaaggacgcttgaacgtcgtacgttggattctcgatcacgatcaggatgatgctgagctgggaggttcgagtgagtgcgaaacctcggacgacagtgggaagaaaatgcgactgacgtgtttgggtggggaagcaaatctagctaccggatagctacggtatccacggagcttgtattaatgggcacctggacattgccaagtatctgtatgcgcgaatcaatcgaccaatatatagcaaggatgaactcaaggaggctgaacgattgaagaaaactgtcaacgtcgtttcgagggggcttggaagaaaacataacgtcgcaagcgtgtcaggaaaaacgatgctgcaagccgcggaaaaggggtttcttgatgtcgtgcggtggctctacacgaaatttaacgcgaatccgaccgtaaacctcttctcggattccgatccgcacggcagtgacgaagacgggggacaatacgtcggcgtggtcggtgcagcagcaggtgccgggcatttaggggtcgtgaaatatctgttgcaagcagggcgagaaagcgttgaagaacccccctccgcttcaaagcgacagcgcacaagcaggtctccacagcgttatctgcgctatcggtcactacttgacagcccgacgaagccaacatgcgcaacaaatgcaatggattgtgcggcatttggtgaccactttgatgttgttcgttggcttcatgccaatcgtacagaaggctgcacctagagcgcaatggatctggctgcaggaaggggactgttggaaatggtacagtggctgcacgagaaccggccggaaggatgcaccacggacgcgatagatggggcagcaagttggggccacctcgacgtcgtgaagtggttgcatgagcacacaaacgaaggttgcacggctgaggcaatgaatggcgcagcggaaggtggccacctcgaggttgtgaactggctgcatgaaaaccgaaccgaaggctgtacaagcgccgcaatggacaatgcggcacgaggtggctatttgaacattgtaaagtggttgcatgcgaatcgtaccgaagggtgcacgagcgctgccatggatggcgcagctggttgcggggcgatggacgttgtgaagtggctgcgccacaacagcaaggaggggtgcaccacttctgctatgagcaaagctgcgcaaagcggctaccgacgggtcttacggtggctgtatgagaaccgaatggaggcccgagatgtagttgatgcgacagagaacgcaagctgggctggccagttcgaggctgtgctaatgcttgagctgatttccaacccagatctcgccatcttggtgctggatgatcacgactcggccgtctggaccaacgagcactatagcgacgtcctgcttgtccttctcccacgaggagaagacgatgacgatggcagcgacgacaatagagggagtcttcctgccgatgcgttaaagtgcaacatttattaataataacttggtttttgtatcgagcaagttgaagtgtatcccaacggtacatcgtaccactacagcaaccgccagtcagcacagtctattggacatggcatcaccatcggctccgacgccgccgctgctggccgtggcgctgctcttccgctccaagccgcagttcgccggcatcgaccacgtcatccacgccgtctccaccttcgcagactcgtccgtggagctgccgctcgcctccgccagtcggttcgggtccgtggcgctgctcgagcgcgtctggaacagctccgtcgacctggagcctggcggcaggtccctctggtcggtgcggagactgctgagggactatccgttgtacaacaagtggcagttcacattgtctctggtgggggcgatcaaggcgaacagtgtggaggtggttcggtggctgttcgaacgatacccggactacggcgtgcggcggaaggtggtgtacgaggcggcgtcagcgggtgcgctggagatccttcggttctttcgagataacggcaccattgtgaactttgcggacgaagaggatctaccagggcaggaatgggatcaggagacggagaactgggaacgaggccgctgggtctattggggcaacgaggacgccgaacgagcggccgctgcgggccatgtggacgtcgttcggtatatatacgagacggcggagaatgaggatagaagtgactatggttccatggaaggagctgttgcagcgggagacttggagttgctgcggtggctccaggaccacctcggtatggaaccggaaggctacactgtgccgatccgtgcagcggccggtggacatctcgaggctttgcagtatcttaaggaacgaggctattgtaggagggaagaagctggggtgctcgtgaaagcggcggaggcgggtcacctccacgtggtgcgctggattatcgaagaggactggaacgatgaagccatgctcacggacggagggagcgacgatgaagactggtacagcaaccgcatgtttcatgcgccgaaagtgcgccggacatatcatacctcgttaggcggagaggcgagtcttgctatccatgccgccgctattaacgggcatctggaggttgcgaagtacctgtacgctcgcacggacaagccgctgaatcctagagacgaagatatcgagaatcgaagacttgccgacaggaaagctacccttgaaagaccactcggacagagaaacaatgcccacaaggtgtcgggtgaaacgatgtaccttgcagcgcagagagggtatttcgacgtcgtgcagtggctctacacggaattcaacgccgatccgacaataaacctcttctggacaagcggacaccatatggagcagctcttcgacagcacagtcgacgcagcagcggcgagcggtcgtgtggaaatcgtgcagtacctcctccaagctgactcagctactcaggactcagcgaatgccgagcagaagccgaagaggagatgcctgcacaggttccgcgactttgctagggacatattggaacaaggaaattataaattggagctcgaaccgacaaggccaagctgcaccacagacgtcatggaccttgctgcccgaaacggacacttggaaatggtgaagtggctgcactataaccggtcagaaggatgtaccaccaaagcgatggacgaggcagcaaggggtggccacctcgaggttgtgaagtggctgcatgaacacagaactgaaggatgtacagtcggtgcaatggattccgcagcaggtggaggtcacctggaagttgtgaagtggctgcacgaaaattgtactgaagggtgctcgagagacgccatgacgttagcagctgaaagcggtcacctgcgagtactccgatggttgcacgagaatcgtacggggggcttcacaacgggggccacggttagccctgccgcggtaggaaacttcgagcccgcgttgattttgcacggcatagcacaaaatggtcttgccagtagagttgacagaatggaggaggacgcatccaaggcctgggtagctgaacagtaccacgaggttgtgcgtgttgcactcaaagaagactgaactgtgcggttgacgatgcctacacataaagatgttaccataaatcttgcttccactgtttcgatcgtttcacttcggattattcgctgtttgctgggtgtaattgggttgttgacgctgctggaagagcactatcaaccttgagctaggtggttggaccgtgaggatagcgctctaagcgcagccgttctatctaatatgggtaattcccgtaagtacacgttacgttgtcttcgctggcgccatggcctaaggtgtgttctttgacaagtacggtgtagtgatagctttttgaacgcttccctggatgtggagcggagcggggatatatgaggcatcgggcactcgtaacccttgatacttttccgctggcagtagaattctacaacttcacctggggctccaaactactgtacctcgctttttgtattcagcaagttgaagtgtatcccaacggtacatcgtaccactacagcaaccgccagtcagcacagtctattggacatggcatcaccatcggctccgacgccgccgctgctggccgtggcgctgctcttccgctccaagccgcagttcgccggcatcgaccacgtcatccacgccgtctccaccttcgcagactcgtccgtggagctgccgctcgcctccgccagtcggttcgggtccgtggcgctgctcgagcgcgtctggaacagctccgtcgacctggagcctggcggcaggtccctctggtcggtgcggagactgctgagggactatccgttgtacaacaagtggcagttcacattgtctctggtgggggcgatcaaggcgaacagtgtggaggtggttcggtggctgttcgaacgatacccggactacggcgtgcggcggaaggtggtgtacgaggcggcgtcagcgggtgcgctggagatccttcggttcttccgggagaacggcactaccgtccattatatggaggaagagcacgaagaaaatggggaatgggacgaggagaaaatgggctgggagcgaggccgctgggtcctgtggggaggggtggacgcggcggaagctgccattgcaaagcacccagacgttgtcaggtggatctacgaaacgcacaatcacgaggacaggaatgactacacggcaatagatgcggctttaatcgtgggggacatggagctggcgaactgggtgatggatcgaactgggatgcgccctgaagggcacgaatccctttttggcgctgccgctaatggatacgtggagccgctgcaatggtttcaagatcatggtgagtattttcaatgggataccgggacgctgatcaaagccgcagaggcaggacaattgaacgtcgtgcgctggatcattgaacgcgactggaacgataaggagctgggggacgaaagcggctcggatgagtacgatattgagtaccgttttcacgacagagggcgccggacgttccattcgtgcctcggaggggaagcgagcttagccatccatgcagcttgtgttaatggacacctggatgttgctaagtatcttcatgctcgaatcgacaagccactcaaccgtctcgatgagtacaaagagaaagacagactggaaaggagaatccaggcgctagcatcgcggctgggagacgagcacaacgctgcactagtcgcgggcgaaacgatgcttcgtgctgcggaaaaggggttcctggacgttgtacagtggctgtataccgagtaccatgccgacccgcgactcaatctcttctgggtggaaggtgccgctgatgatgaatacggatacagtgaggacgactatgaggaccctcatcgtagcgtggttgatgcagcagcagccaatggtcatttagatattgtgcagtatcttcttcaggtgaaaaatgaagccttcaaggagtcggaggacgcgcatgcttccaagcgacgacgtactggaagctttacgagtagcaaggccgatgacctgtcaaatgtcctggtttcctcgccaaacacaccagataaactgagtgaagcggggtgtacgagagcggccatgaatgatgcagctgctaatggacatctgaatgtcgttcggtggctccacgacaaccgcacagagggatgcacgaccgcagcgatggatctggcggctgccaatgggcacttggaggtggtgcagtggttgcatgataaccgtagcgagggctgcaccaccgatgctattgacgatgctgcaaggggaggtcacctggacgtgatcaagtggcttcacgcacacaggcgcgaaggctgcactgcaattgcaatggacaacgcggctgcggctgacttcctcgaaatcgtggaatggctgcacgaaaaccgtagcgaaggctgcacacctgcagcgatggacggggccgccgcgtacggcaagctggacatcgtcaagtggctgcaccggaatcggtccgaggggtgctcggagcgagcaatggacagcgccgcccacggtggccatctgcgcgtgctgcgctggctgttcgagaaccggtcggagggcttcacgactcaggcgctggacaacgcaacgcgcttcggccagttcgagaccgtgttgatcctgcacaacctcgcccagcaaggactcgccagcggagtggacatcgtggacgccgccgcatccaaactctggatcgcacagagatacaacgatatcatcactccactaaccgcagtagacaaaatggagctcacgcgggcgaattgaagcggctcagatgaaaatatagttgaagttgccttgcacttccaccacaaaatggtacaccgtaccacttgaagtctgcgctgcgattggtggaaacgggctccagcctgccattcgcgcattatcctcctggtgagccaagagtgagtgcgcactccctcgccccacgcctccccgcgccccgcagacgatgaacgagcagccctgaggcccctgcagacgaccgaccgaccgaccgaccgaagcagagacacacaaaggacccagagccatgcgccacgacgcagccgcagtagccgccgctgacgcccacgacgccgccgccgccgccttcaacccgctggtggcgctgcagtcgctgctggcggccgacgtggccagcgccaagcagcgcatgcgggcggcgcagcagctgcagagctacttcgcgcggctgagccacacgcccggcctgctgctctcgtacgagccgtacctgccgctgctgacggagacgctgggcgcgccccaggccgccaagggcgcgagcgcgcaggagctgcagaccgccgtgctggccttgctgctggcgctgtcgggccacaacccggcgggcttcagcgactggatggccaggaacacgcagctgggcaacgagccgtggctcgtgcagtggagctacgcgctgctgctgcagacggagaaaacggtgccaagacgagaggagggagacaatgatggagagctggacaagttggatgagacctcgccgcagttcaaggagttcgacagagcctttgctagggtcttgcacatgtggaggacgctgctggaccatacagctgacgtggctcttgtggaccagctcgtcaagtacttgcaggtgctgctggtgcagcagcaggaacagggaggagacaagtggaggacgatgatgctcaagaagctgcagacgcactttgtggatatcgccgacgtgttgattggatggatgatgagcacgggaccgcacggatcgctgcggtatgtcgaggagcttggtttttttgttttttcgcgacaagcgctgaaagctgatggattattgttcttgcttcggcgtgagttacagggaggagatcctcacgctcttgcatcattttggccgcttgtgggccgacaacagcgtgtttagtcttcagctgctgagttcgttcgcggatgtaagtttttgacgctggatagtggccgaaaagcagtttgattaaatgctttggtgttgtaatcggacaggaaattgtcaatttgtgcgattcgtgggatgatcaccaagagggcgatgacgatcgcctcagtaccctgttaacttgttttatgatggtagctcagtgcgttccagatttgggtaagatgaaatgtccgcgcatcttgaattgtataagatcacatactaatagcggattatgtgctggtgatctttgcagctttacccacggaagaaagcgccaatagctcattcgtaagagtgctccacagtgtagcatcttgtccgaagccggagtattcgtacgttgcccattgttcgcttctttgcgtgtatactgcagttttgtctgatacttcgttgaaatgtacacacagccttttctgcctcgcgcattgctccgagtatatggtaacgatgtctagctctaggcatagcaacttccctcccctttcggtggcagctgtgagttttttactgtaccattgtgctgttcaagctcaaatgcatgacagtgaggtggacaaactcgcaacggttatgaaaaatgcctgcacactagcaagtgcgaatttttcccgggtagaacgcactccacctgttcaggctgccgctgtaagaatacttgaaggtgatttaccaacccgaatcgtgaaaaagggtggacagccaaagcgcgtgaaagttatggaatgcctgttccaagtacgatgcgctaaaggcctcacgcgaatcgcgcagctgtgtctacatttgctgcgactgggaggagttggcgctttaaaggtgagtctgcaaccgacttccatttttctgcaaatattcacagtaccttgtttccgtagaccctcgggactcgagcatttcagcgtctaaacagccggcataaagggaagagaaatagctatttcgtgtttgcggctacatgcttcatcgtagcttctcggaacagcgagatgctgttcgcatctcgtgacgatgtgacccacgcggttggagttctcgaattggttacagcaaaactggaaaagcagagccaccgacatcgtcagcaccgactgacgccccggcaattgtgcctcgtgctcaagatggcgtctacattcgtaagcgccgtatcccgcttctttgttggtcgtcatgatgtagcggaggctgtgaaaggcgtagctcatcggcttatggaatgcgcagttcacatgctgccaagtgaggcggtgcttgttcgagatcatcgactcaccactgaagtactgaaggtgattgataccgtgctatcgcaaacggattctgctgtcgtttccccccacaaagtttacgcatacgttttggagaaggtgaacaaggttgctcgctgctctaacgtgaaagttcaagagggttgctttgaagtcttgaaaacgctcagttctcgggccgaggcaagtgtatttgtaggtgatgtttttaagacgctgctggacttcgtgttggatttcgacggcgcagtacaaagcgggttggtattggaggtactgagtggcattgctcgcccggcactcctgtatcaacaaaaagagagcgttccctgcgtcgtatcacagcccttgcattcatctttcgtcggagcagattttgaaaatcttatgagccttttcgagtctcgtgaacgcgatggaagtgagtggaatggagcctgccgacaaattatggaccgaattgaaccagacacggtggccatcagtaaatccgacgtgcttctgggtgcagttcggcaagcagccgcatggtgcgttcagaatcgattacgcacacactttggaggaccagctcaaaccttttcaagcatcgaacaactggtgcaggagtactcgaatgggggtcaaagcttagccgagacggcggagccgcaccagttgacaaagtggttgatgctggaatttattaccgccttggagatgagcatcactcgtgctatttacgctactgaaatcgatcaaagcaatccagacgctgaagagtacaaggcagtgcttttctttcgtacgaacaaggtggtgtgtgacgattggcttaaccgtattcggccgtatctcgtggagttgtccaggaacggaacgtcctacgagcagtgccggtatcacagccacgcaatggtgacaacctgctacaataagctcagcagaacaatggcgtcatttgcaacacacgggttttcagacaaaggatacaacgagctgaaacaagcggaaaaggacatggatgttgcactcttcttcctgtgtcgttgtcattgcgatgcaaaagatgtcgacactatcattggttttcaaaagtggggtgaatcggtttccgccgcccttacaagttggtaccagctaaacaaggagaagttgggtatcactgaagaactatgcgatttctcatttttccgatggctgaatgcagtgcgatatgaggctgaaatgcgctatgaagatgctgctgcagaatacgaggccttgctcctgccagtgctatctgctcgaagcgaaccactctctttgggcggcattagtgccgcggggatctttgagtccccaacgacgtaccttcggatgtcatctcaagcacttctggggtgcttcaaacaatgcgcgaagtgctatgcgtctctgcgcgaatggtctaagctgcggatatttgtcagtcagttcgtagaacttgctcagtcgctggtgaatcatgaccgccccattgaggatattcaggcgatatttgattgcagtgatatgtggagcgatgagatcggaacgattcagcgtttggaggctcaagtgaatgcgtccacaaaaggaacagatttggttggtgatccagctaaacgggcatcgctggcgctccgggtttggaatgtgcttggtgacccagatgccaaaccaacacattctgcagtgcatcttggtagcgtggctgatcgatttcaaaacgatttaattccgttggctttgcagccctcgccgtggaatgggtacgcgggcgacaaaattggcaagaaagcggaggaaacgttgcttcggatactcggggtctctacgaggtctcaatttccacttgcgccatttcacaaaacatgtgaaatgcagctcaacctgaatcctgagttgtatgactctgttgtttggagtcaaccattctgttctgctggtaatgctggaggtgctgacacggagagtttgtacctgacgactgtggcccggctggcacggaagcaacacaactttgggttcgctcgaagcattttaagagacgctgcagctctcagcggggtgggccgtaccgcatctatggctgttagttacgagaaagcgaaattactggaaacagtgggtatggaggatgaggcgcgtcgtctcttagaaaaccagtgcgaaacgaacctggcggcaatcgttgcgaagcctggaatctttgaacaggaacatccggcccttcgcgctttgctgcatctctccacaacatttgcgaaagcagatagtgcagagcttttgtcaccgactacatcacgctttcttgacgacacggttacaagctttcgtaatgagaagctggctaacctgagcgatatcaaccttctatctgatagcccagatacagcggctcacagatgtctcgaagcggcaatttccatatcacccagatcggcaaaggcctggatcaggtatagtcattggtgttacaatcgaggaaaacgtgaaattgcagagattgcggagcagaatggatatattcacctagctccgtcggatgaattgcagatgaattctctactggacgagataggtgtcgttgaaccagaccgtgatttcattattcgcgcgttttgccatttcctggataacggggagctggttagccagaaacctgacgaatttcaccaactgtgcattgatcgagcacccgcgactcacgatagtgatgcagttgatcggctaatccagcttcaacaggcatgtcattccaaggtgctccaatatttcacgttggctgctcgtggctacgggaattatttcgccgtaatgttcggcgattcagactgtaaagccccacgacaggaaacaaccatggtggcgcttcgcttgcttagccttctgacgacctacggattagaaaaagatatcgtgtccgcgcttgaagacgtctttgccaacggaccggtagctccatggtcctacgttgttcctcagctgatcgctcgagcgcatcatccggttgcggctgtttcgtcactggtttgcctgattttgaaacgattagctcgtcattcgccccacgcgattgtgtatccggctgtggtggattccatggagcctcaagttacattttcagcgcttcaggaagagaaaggagctgccagcaacagttttgctgctgttttaaacgagttacagcaagtgtccgctgggcaagtagaaggcgtacgtttactcatttcggagcttcggcggatttcgattttgtgggatgaagcctggatcagtacgttgatgaagctttcaacagatgttgatcgacgaacagctacgctggaaaaagaggcctcccgcgtggacagaaatgcgtcattgtccactaaagaaaaaggtgagctagctcagcgaaaactggtggccattatgaagccaatcttggtttctgttgaacgactttggagtgaaacgtgcggtagaattgcggagcagcatgctgtgtcaccgcatgaacgcagattcttgaaggagtacggaagttcaatcgagaaggcgatggaaatctttcgagattgctgcagctcggagttgcgatcgggtccagcatcaggcatctcgagcccgaaagagctctggcaaccgtttgctgaaatattgaaagcgctactcaactcgactggtcgtagagatcaattgccgcttcacgagatttcaccctctttggcctcgacctctcgtcagcttgcgctaacaaacatgcccggcgcgttgtctggcaaggatgtgggtcaaatggagcccataaccattcatcgtgttgactcgtctgtaacgatactgcgaacgaaaaccaagccgaaatctttggaattaattggatctgacgggaaaatctacaagtacttgctgaaggctcgagaagatttgcgtttggatgagcgcatcatgcagtttttaagagttacgaacgagtttttacgcgctgacaacgctgctgcttctcgagatttatcagctcaaagctacagcgtcatacctctatctcgaaacgctggcttaatccagatggtcccggacgtggtcccacttttccaagtgtacacatctcgaaacgagcaacaaacaagccccactggtcgagtacctcaagattcagcagcatcggcatctttggcacagcaacaaccacctccgcctacagcacaattttatgcgaagctgaagcaacatggaatttcgaatgtggtgccaaatcaccgtgctcagtggccggtccctgtgctaaagcaggtttaccaggaacttgttactcagcgtccgcgtaatgttctgcagctggagattcttgctcgaagtgaagacttgcgtgaaagctgggtgaaaagcatgcgattaagcaagtcggtggcggtgatgtccgtcttaggctacattgttgggctcggtgaccggcaccttgacaacattttgttatgcgttaaaagtggagatattgttcacatcgaccacaacatttgtttcgacaaggggcgcaggctcaaggtacctgaagttgttccattccgtctgacaccaatgctgcaagatgctctcggattcaccggtgttgagggaaggttccgtgtagcatttgagacgactttacgcgttgttcgctctgatgatgttcgcgaagcgttgcttacgctgtttgaggcgtttgtctatagtccactcgtcgactggattgccgacgataaacgacagggtcggtcgggagatttgaaggcgcgtttggaagtgaacgtgaacctttccctgtttttatcgagagctgaagagcgccgccaagatacggtttctttcgggcgccagtacgagcaattggctgacgtcttctcccgtattttcaaaggagcgaaggtgtcgtttgtgagactgcttgagcaacgggagcaaatgcgtagtctggaagctgaagaacaggaactattgaaggccgtcacgagtagtgaaactgagctcatggcatcccaagctacactgcaggctaaactggctgaagtacaacagatttctacccaagccgaggaagtcgttgggaagcttagcgtgttcgcaaaggagtgctggggaagacaccaacaaatcgaagtttggcggcagaaaagcgttaattttgccgaaacaggcccagaggcccgattgcacgctgtagtgatggcagccgagtcagcctcgtttcagaaagtccatgctacaatttgcaatgttttggaacggtcaagatttgctggccagcagacagaactgctagccgcgttggaatcgagatctcgatctgtcgatactgatgtagtacgtctgcgcgtcgagattgaaaggcttgcggcttgtttgatcccctacctatccgcttacagccactggcgcaaggaattggatgcgtacctggacacagagctgaaggtagcaggaaaagatgtgtactttacgtggtggagtcgctgtacgcagtgtttgcgtagtttggagacagggagagctgaggacagcgtcgatactaccgcgggttgcatggctccttctgatgaaaacatcgctgaatcagcaatgactttaaagaggctgaacgaattacgttcagaaaacggtttgcatgatgacgactccgtcctcaccagcgagtcagagagctcgtacttcgcgaagattgacaagttgcttcacgatatttcgagttctctttctgtgctcaagctttccaatgcccaaggtcaacgacttttgaagctagctggcgcgtcgtggatggttaaagcgatggataagttgaatggtgctaaaagccccacgtccagtgaagcaagtaccttcagtactgttctgaaggaaagtcttactttccagctcgttgtagcaatgtctcacgcgtccatgacgctgctcgagctagtgtcaacacctaagggatcgatgaagagacttcgagctaatgagctgatggttggttatcaagcccaaaaggaatcgaaccaagaaactagcagggggttgggtctactcgttgatattctccaggccatggagttgttttctacgtcgttccacgaagagttcgtgctcaatctgcatgggtgccagaatgctggagattatgagaagggcctattaagcatgatcgaaggaaaactcgctacagcagctggagtgctcgaagtgatggacgtgatatcttctgcaacaagttgcggcagctcgatattgggagcatcgctttcagcatgccccgctacactcaacgttttcagagctgctgttaacatcattcagacaacttcgtcgtatgtggaggtattgcgccacactgcggtggtggccgacaagagggctgaagagatgaagaattccgctcgaagtagttggatccaattgactgtcggactcattaggcgatttacgttcggtaaagaagaccgatcacaaggtgcgactggggatgaagtgaccgaaatgtgggctgctcatgtgaggagctttatttctgactgtttagcggtattgctggagcatcaactatctaacatgatttctcacgactggaagttcgactttacggcgcttccaggcgactccgatactgatgataatggactgggatcgctccgcaagaagtggggagcgtttttcagcgcacaaatccccggcgttttgccctctagtttggtaagcctgcccggtggaactccggaaacgcagacagatgatgtttgcaacgcagttatggagctgatgaatacgtgcgaaacgtggtggagtcagaagtggagagttactcaatcgcaatcgtgggctgagacggtttcttccctccgggaacggcatcaacgacgtctccgatacgctgcatggttggcgacacaaccgatagagcagacacaattggctgaagtcccgagtcttacgcgaatccaactgctcactgttctgtcgtcacaagtgccatatctcaatacgctacttacacagcaagctatcaccgaagcgaccgtgttggaattggcccagcagttggactattttgccgcgagtctcgacgatgcctccagcaatgagcactccgcgaacgagagcttgcatgtctgtgtccagagctgctacggtagagtggctgccctctttgagtatgggcgaactctggcagatcttgtacaaggtatcagtgtgatcgagacttcaaccggcgagcatatcccagaaacggggaagatcgaacttgaggttgatattgtcgggaaaagcctcctccactcagcatgtaagcccagttcggatctgctgacgtcgaaagaggcgctgaatgagatgaacgcccatgttaatgcacttgaagacgaaacgaagcgtaggcaagcgggctacgaggccctagtgacgagaaagcgtgccctcgaagtcgaatttttcggtgtctgcggagaaaataaggacgctgtgatggagactgcgcacgtgttaagcaaacacgtaaaggagctgcggcacctactcaagcgctttgataagtttaagacgccgtcaaagcaaaaccaagtgccttcaccgatggatccgcgccgctcacgacaactgcagtctgatcaacgtgacccacaacctttgcctggagcgacaggcttctgcttcatggagaatgatcggcttgtgaagattttacttcgcagcattcgttctgtggaccatctacagctactagagggcgttttggaaaaacatggggaagcgtgcactgccttacgggaagcaatcactcagattgaccaaaccttgcgtgagtatgagtctaaggctgacccgttgttgactgctagcggccacgatcctcaagatcactctcgagcttctctgctactcaagctgatacttgatctggtcgaggcactacgtgtagttgagaccgatccatgtgctggatccccggggcctgtagcagcggacgacacctcagcaccccttctcgttgaggctcgagacctcgtgcgtgggtgtgtgaagatgtttttcgaagccacagaaatggctgatcggctctctagcgcagaagacgagattactagagcaagtgcgatcgcttcactaccagaggatgaagtggaggaagagcagaacgaggctgcagaggattctaccccgctcgctttggagtcaggcaacaatgttgcagttcctgtcagtggtgacagcggtagcagcgcacatgacacgaccgctagcactcctccaagtgtagaggagaagagtcaatacggcctccaagtgctgaagcgtattgaggaaaagttgtcaggcaccgtgacggaaatggcccaggctcccccagtgctgactgtcgagcaacaagcgtcgtggcttatcgacgaggccacgaaaacagacaacctgtgtgtcatgtacgaaggctggacgccgtggatttaggggaaccctgaactgaagtacttgcgacttcgagcatgtttttaggttaacgctcctaattaccaccaataaaagggcttccagcaaaatgtttcacgtatgtactctttcagatggctacactagatctttcggcaagttctagtgtagccatcaattgtttatttggtgttcttcacaccaaacttaccgatcttccccacgcgctgcacacgtggaaggccaaagcgtcagcagctctgcgcgcgattgaacgttcgtgcgagtgatgcagcccaactacccgcagcgtggcttcggcggccaggcgccgccccagcagcagcagcagcagcagcagcaggcgcctcgcagcggcggtggcttcgcgccccccaacgctggtgcgtccttcctctgcgtgtgtgtgtatccatctttcgcaccttggagctaaccccgtggtgttatggcttcaccaggctacggcaacatgccgttcaaccagcaacagcagcagcaacaacagcagcccatgtcccagcccagtgccggcaacttcccgggccgcccaggcttccccggcgcgcagcagcctcaggcgccgcactcgggcttcggcggccgcccgggcttccctggccagcccggcccgccggccccaagctcccaaggctccttccgccctggtcaacagcctggaccaccggccccgggctcgcagggatccctgcgccctggccagcaggttggccctccgatgcagggcccgccctcttcgggcggcaacagtggggtgcctcaagtgaacaggggcccgcccggtgcggctccaggacgcggtggattccccggccaggcgccgccggcaccgggtggctttaacaatgcgccgcctgcagcgggcccgccgtcgttccagtctggcccgcaggggccacctaggcagcactttcagcaggcacccccaccccaaggacagcagtttggcaacgcgccgcctcctcagggaagtcggcctggcccgccgccgcagttcggcggccaacagcagggcccgccccctccgcagtttaatggccagcaacagggaccgccgccgccgcagggaggagcggcgccgtacctccagccgaacaggaatgccgggccgtaccccggacctcctggccctggtgcgcagccctacggtgctcctggcgcccccggggcctatggccagcctcaacaaggataccctggcccgcagcagcaacagcaacaggcttcccaggcgccgaagcagcgtattgacccgacgcagatcccgcgccctgtcgtgtcggccgagcgagtgcagtatgtggcccgcggacacacggtgacgatgccgccggcggcgtccagcgactacgtctgcgtggacgaaggctgctgcaatccgcgcttcattcgcccgacgctgaaccacgtgcctgcaacgaaggacctgctgaagcagtgtggcctgcccctggctgcggttatctgcccgcttgccgacctgcaagaggacgagctgcccatcccgctggtggactttggccccagcggtccgctgcgatgcacgcgctgtgctgcttacgtgaactccttcaccaagtttatccagggcggtcgcaagtttgtctgcaacatttgccagctccacaacgagaccccgcgcgactactactgcagcgtggaccagtacggcaagcgccgcgatattcaggagcgtgcggagctgtcgcgtggctcggtggagtacgttgtgcccgcagcctacacgattcgtccgccgcaggagcccattctggtgttcgttctcgacgtgtcgctcttttcgttccagacggggctagctacgagtgcgctgcaaacgatccagtacctcctgccgtcgatggcgcaaaacaagcgcaagaaggtgggtattgtgaccttcgacacggccgtgcactactaccgcatggacaatggttcgtcttctatctcgatgaacatttgccccgacgttgatgacccggtcgcgccgctgcctcccagtagctggcttgtttccatggacgatccggccgccgctgaaaaaattacagagctgtcggaggtcattacccgctcattcgagaacactactaaaaaccaggcggtgtcgggtgcagcgctatggagtgtggcggacgctctttccgtatcaggtggacgagttgtgttgctccacgctggggctcctcgcgtgggtgttggcagggtgaagcgtgaagaagtgagtggtgcttacggtacgacgaaggaggtggatctgtacactccggaggataacaacgcctacgaggccttggctcgccagtgcgctgagaaccacatttccgttgacgtgttctcggtcgacaacacgttcgcgtcgctggctgatgtgggccgtgtgtgcgagttgactggtggccgagtgcagtacatgccccagttcgagaaggagcagtccagcaatcgtcatcatcttacgagcatgctccagcggctcgtggaccgtgactgcggatacgaggccgtgctcaaggtgcgatgcagcgccggcctgcgggtcgagcactcttacggaaactttttcaacgcgcgcggtggcaacgcttttacgacagatgaaatggagtttgctgtgattgaccaggaccgttcgatgtgcgtgacgttcgcgtacgacgaacctcttgcggagggcacggacgcgtacattcaggcagcgttgttgtatacacgtagtgatggattgcgctgtgtgcgcgtgcataacctcgcgctgcaggtggagccattactatcaaatgtcttccgcttcgctgacctcgatgccacttgctccgtgtggcagcgctcggcagcgcgccagttcgtggacaaacaactgatgcgtgcgactcctatggccgtcaaggaatcgctggttgaccagtgtgtgactgtgctattcaactaccgcaaatactgcgcatcatcttcgtcctccggacaactcatcttgcccgagtcgctcaagttgttgccgctgtacacactcgcaacgctcaagagccgagcactacgtggaaacctcgttgggaaccctccacgcggcttcattgatgtgcgtgcggacgagcgcgtgatgatgatgggcctgctgaacagtctccctgtggagttttgcgtatcggctgtctaccccaagctgtacagcgtgcacgacttggcggaagactgctgtacactggacgaggacggcaagtttattctcccaccgcagctcccgcctactgctgagaagcttgacgaggagggcattttcctgttgcattctgcaatgtgctgctacatctacatcggtcccaaggcctcgcctgagttgctgctcgagctcttcggcgtggaccacgccgacacagccgagcagacactaacgctgttcgagacgctcgacaacgagcctcctgagggcgatggcgatggaatgagtgctcgcgaacgactgcgctcgctggtggagtacctgaactctaccatcccgatctcccagccgctggagattttaagtaagaacgactggcgcgctaaccgcttcatgagtgcactggtagaggatcgcacacgcaacgacgtgtcctacgtagagtttctggtgcaggtgcacaagaagattcagtacaagttccactagatcggagaaggagaagaaatggtgtgcgctgacggaaactcgggatggaagacgagggaagctttgacatcaagaaggcgaaaggagttagtaccacgaacgagcgcttgaaaaaggctgctcacgttttgtctttcttgttcatcgaataaatgcgtttttgtcagcattgtgggagcttttcattcattcacatggggggtatgcggcgtccaaagtgaacgaggaagccctggcttgccggcgatgctggtactaacttggccttggagtaagtctaacaagcccggccgctgtgtcaggcgcgcttccgcggaggcaactgtgctcaccgactcacgacattcatgtcatgtctttaggtcaatatgcttggtaaaatccttcagtacttggaagttccaagttggtaccccctactgtatttgtccagcttgttctctcgctggtccttcagctcgtagttttacccgttgtattttacttaattttgtatagtaaacgagcaagccttgcgttagtttcccttggaccttcgccatgctcgggcgcaacatgcgttagtttcccttggactttcgccatgctcgggcgcaacatcggatcttgtcgactatttcacggaatctacgctcctgaaaaaggtgctgccccatttcatcggcgatcgatgcttatcgttgttgatgccggcatcttcagagttaaaaatcttttatcgatagtgaattccgaagtaggaacggaccacagctaatttcatgtacagtgacacctccctaaatgaaccactctaactgacgactgcaaacgggattatatggatttcactatagatgttctataactgatcaaaaacctctttattctctaaatggtcgtcattgttggcgcctcaaccctctaaatggacgccgtagtaatagatccaaactcatatattttttctcaatcacttgccggcctcctcccacgtatgccattgctactactactcccgccacaacaaatcgagcgaagagagaaattttatttgggatgctaagttggaacaaagagtttgcagtaactgcaagcttgtaaatactgataaataagctagccacagtattttacaatcagcgcagcgtacatatatattttacgaaaaacaaaaatattatgatgtcgagacaactaggggctatgcagtagatttcaagcaaaagataaaactgcagacatggtggcaggatatcgggacaacaaatattcctataacctcactaaattgaaactcacgtacaacctgaggggatgcgactctgctaataccaatgataagaaggagtaggaacagacaataccgcgcctaccgttattggttgagttctgattgtgtgaagacgaaacaaaacaagagtacaaaaatgctggaggggtgccaggtaaagaaagcccttgtattgtgcacctaacatatgaaaatgtagccattagaagtgtagccatttctttatctgatcaattccttaactgaaacagcgtattagaccgagcgaactgggtgtcatttatagaggtgtgactgtaccgtcgacgttcatattccatcaacattttcccttaacagagcatcttgcgatcttaaaacatcgactcgcgttacagcacctgcacaacatttgcctaaagcgcctttaagcccttcggcgcctttaagccaaaaagagggggtgaatctgggctgctgcagtgtactggagcagatccccgcaattagaaaactagcaccgagttgcggcaacgggtccatccgctagaatgcctggtgcaggacctacctccgcaaaatcgcgcagacctgctttacgagcactccgcgcagattagcttgctgtggcaacgtgtactcacgacagctcacaacacgaccaaatgagcccatgacacccgtcccgctgctatccgtcaatacaaatccttcattattctaatctgttgcttctgaacaccgattttgcacagattggatgggcgctttaaagtatgaggagggatgacctccaggcctgatggctttggaaatgggcaccccgaaagagtccctgaggaggcgggggtcctgctaagtgcctacttacactccgccgatgcaagctagtgcgttcgatagctctaacatacctctatgaagtaggcagtaccaaacgtttgtccggatgcaggcttacgtgctgcatagagtcaaagttagcacccgtttcggactttggaaagctgaggcaacaatctatatattcccctcctacctgaaaaccagctgctttactaatggcgcccaagccttgggcgccatgccttggaccaaggcgccattaacggtgctgttgtgctgtcgcattaaaggtgctctaaccacctcgtaaaacatcgagctctgaataccagagatctatcggtaagtaaaaagcaaaaagtcatgactcggtcatgacacagtgacctgatatccggggataacagcctctttttggcgtgttacctcgagataccagttggtgggtcatgacccaaatactacgatttgattggcagtattaattacaaatttggggcgaacctccattaacacatctcaaggttgccattgcccgtcgctcgtaccccgtgccgtcgggcatcttggcgctcgagtgcccgcgtctaccaaccctgcctgccgagcaccctgcccgccgagcacgcgtcggtacgtactgtaggtcgtcatatacatggtcatcgtacacacgacgccgctaattgtgactctgtggtggtggctctagtagcaggtcatgcacatctagggcagctactacgatgtcctggagcactacaacgcctacagggtgacgctgagcctcctcgtcagcatgacggtacctttgtgaggatccccttcttcctgttgctcaagacgtgctgtgcgcagcggcacgatctgggtatggccatcgagcactgcagctctgttggcatcttcatatccgaccagtcgagcaaccgcactaagagctacaagacgcgtgttgaaggcagcgatatgtgcgcgctcatcaacgcttcctcctacgctacgtctagcgccaccgagacgtacgatgagaacgcgaacgggccgtacctgcgcttcctgggctttgaatcgccatcgtgaccatcattcaggagctagtgcgcagccccatcgaggccgtagtcactggccttgttaggtaagcacgctttcatatcgggactgaaacgagttatggcaactaatttaatgatgtaaatgttggtattgcagttcagataatgatgtcaattagactgtcgaatgcattacgctgctaatgtaagtcatcgtgctgtttgctgcgaagccattttgaataactgtcgatgctcttgttccccctctcagtatcagctctttcaatcgcatcgtcgatagagagaccgccattcacgaagctacgtaccggtacgtgattgatgccacatcgacgcctggaaaagaatttcgcttcttttgatgacgctctccattttgtgccaaatgtttcctccaggtactcgatcgaaggctgactagccaggccatggtgccactctgcccaaacctctcgtacggttgaaactcgtcggctcatgttgtactggggaactgtgactggttctaactgaggtgaatgttgctgtagcgttgcgtttaccgaggttgacacaggagtgctgtcacgtagaggaagctggcttggattagctccagctgcgttgttagatatgggaagaagtcggtaaaggacgtcaccgtggagaaatgaagcaagccgatattgggattgcttcaccatgtcaacgagagtcaagtgctgagattctaaccgctgcatagttgctgcgtgctaatttgttgcgacaggactggcatggcaagctgaagctgcatttccaccgggtgctgcgtcgtctgagcgctagcaagtgcttgagcgcggaattgttgaaacggtccaccgaagatcggatggcggcgaagtcgagcaggaaggacgtcaaataaaatgcagcgtcttgaagcaacacggtgcgtaagaattccaacaattcaatgaaccctcgagcggcgaggttgcattcccactcactatctaatagcttctgtttgtaactttcaagcccagggaaaatctgttgcttgagttcattgggtgggtccacaatggcacgttccaaataataaagacgtgcgcgcggggggtgtcatgacagagcacgaatcgcttctcgcgccagaggagcggaatatactgcttccatggtgtcaaggctccatcggccatgtcggcgactttgggagatgtcgacatcagcgccttccagttgtcgtacgccctgttggcggttgatatgaaccttttattgaacgtaaggccgagatgatcaaaaacagcctcgtagcttttcttgtcagtgttgcaggatatagctttatttcgatctcggccacttaggaacttgatgtcataccagttctccgatctccgaaaggagggaaatgattcactattgagatgaaagcgctcaaacaagtagatagcaaccgctccaacagggcataaatgaacagccttattgcgcatgaagccgacatgctgaagttttccaaacgtattcgttttcccatgttggattagcaggaccaacgcaatgcacggctgaaaaccctccttgtcaagttcctgggaaaacatatcagccagcttgtaacgggggtacgtggaatagtgaccctgtcactattccgggatggctacatcggtcactcccctggatagtgacccaagtggcctcagagccaacagatacattttgtatgacacaaactatagggaacttaggatttgtatgcaggccaaatctgtaccaacctataaatacattcagtcttagatctaccgcttttcatgtcaagtcgtccccttcagaccagggacacgtgaacggctgttcacttggagtttgtatactcctgcttcctctgttaagaagtgctgtgtgcaccgtcacacttaatagcacttgtagtcaatcctacgcctacgcgggtagattggactacctaaatccgctgtggtctcatcgagtgagccaagatggatcgtacggagtttccccatctgaacgactcgcagtacgagtccgttcgtaagatggcaggcatctttggggcagatgccctgcgtagcttagcggcggcgacgccggctgagcaggttgagcgtatcaacgcgttcgacacctacgagcgagggctcatcgcccacgttcaagggctgcaggccactgcggccgcgccgaagccggtgcaaccgaagcccctgcggctgaaggttcaccccttcgaagggaaggaaggagaaaaccttcacttctgggttcgagaggttgagctcgcgatggacgcggctctcgtctcggacgagcgactccgtgtcgcctttgcgctctccaaccttagtggtcgcactaagagttgggcgtatacgcgcgaagcgacgacgcctggatgcttcgcatcatggtctcagctgtgcgagcagctgcgggccgcgtttcttccggcgaactacgagtaccgccagcgttcgcgcttcctcgcctgcaaacaaggaaggcgcgagctgcatgagttcatccaggagatgcgagtgctcactgcctctttggtggggaaccccctgcctgaacatatcaaggtgaccgtgttcatggacggtctgcgtgtcggtcctgcccgcacgcaactgttccgtgtgcaagcaaacactatggaggaggcgattcagatcgccctccaggaggagtacagccacaagcaggctcgtacccccgccacggtatgacagagcaaccctgcctctggcggtgtgcctaatggtaactccggcaatggagcgatcaacgggccggttcccatggatctgggcatggccgagcagagcgacattcgctgctacggctgtggcaagcttcggcacatgaaacgtgcttgtcccgcgggaggactgaagaagaagttctcttcgaagccctttggctctaggggtcgctggcagaagccgcgccccaggaaccaggggaacgccggacaccagtaggggcggggcgccctactggggaaacactaagacttcatgaggggcgtgcgggtggcgcacgccatggggacttagcccctgagagtctctgtactctcgaagcggggaagggcagcggtgggctgcttgtggtgcacgcgagtgtaccgggatacgatcatcccttgagaatcttgatggactctggggcgtccaacaactttgcgcgccgccagactgtcgcacgcaatcgggacaagtacgccgatgcgctacgaggcagcaaaggcaacggactggtctcggtaagactggccgacggtacggtggtagaagtacctcgggtccacagggacctcactggtaagttagaggacttcgacagcacggagccgttcttggtcctagacatggacaagtacgacttgatccttggcatgccgtggctggagaaacacgagccttggatcgactggcgcggcaaggccatcgggtccagccatcccccacgctctgacagagctttggtgagtcatgttcccacctctggtagcagctggggcgcccgcgagggccgccagggcgcagcagcgtctaatgagttcttggggtccgtcgagactgacgacgactccgaccgggccggacaaggcctgagagtggaggtgccggacagcacctaccaggtgggtaacgtaggtctacacgcgggtaacgaagtaccgcaggcagcaagggctgctggagaaggcgccgctggcgttggcgtaggtaaccatgttccacgcgcggtcactcagaccgtaactgatgaggaaggcactgcaggcgcttctgatgtgggtaacataggcccacaggaggtcactcagaccataactgatgcgggagccgctggaagcgctcctggtgtgggtaaccaagttccacacggcgaggtgggtaacatagttccacccagcaaggcgggtaaccaagttccgctcaagaacaaggcgggtaaccaagttccgctcaaggacaaggcgggtaacgtagttccgcacgagatcgagaagatcggtggtgccgtcaaggcggcgccacgagacgaagatacccgagggtcacgtcgtaagccgggcctagtcgtgtggccgacgacgccagtcgccagcgactccgagcctccagccaaggctccagccgccgtagagtgttatcacatcttcgacggcgtgaccggtcgtcgggtcaagacaggagctgtcgagcttacagctctgcccgaggtttcagagttgctgaaccttgaggagctcgccatggaggactacttggccgagctaaaggccggggagatcgcagagttggttctccgaccggagtccacgtcggccgagttgaactcgtcctcggccatttaccaggcagtcctggaggagttccagagacagcgcgcatcgcgcatgggctctgagattcttaagaacccccgggatccggtgtaccccttggtgaaggagtttgaggacgtggtgtccaaggatccaccgtccaatctccctccggacaggggaatcaggcacgagatcgatctcgtgccgggcacgaagtactgtgtcacgaggcaatggcctcttccccgggagcagtgtgaagtcattgatgccttctttgccgccaaggcgaaggcaggcatggtggggagtcgaagtccccgcactcgacgcctaccttctgtgttcgctaaccgaacggaatgtggcgtctggttcatgcttataacaagctgaacagcgcgacagtgcctgcgcagacaccgatcccgcgcaaggacgtgttgctcaacaacatggccggctgcacgctgtatagcgcgctggacctggtggacggatactaccagatcctgatgcgcgagagcgacatcccactcacggctgtgagcacgccgagcggtaagctctgggagtggctggtcatgcctcaggggccttctaacgccccggcaacgttcaatcgcttggtcacacaactgttccgacctttgcgtgcgttcacacagtcgtactttgacggcatcttcgtccacagccgtgccgaggcaggccagacggccatggaggtgatctccagcaccttcgacgtgtgttcgaagtcatgcgggcgaacaagctgtacgccaacatcgacaagtgtgtgttcacagctgaggagatcaaggtcctgggctgcttcgtcagcagcgccggggcccgggtggtcccggagaaggtgaaaaccatcgcggcttggccgccacctcggtcgcagaaggacctacgacagtggttgggcctcgccaactatatagtgcaggctacgccgagctggcacggcccttgtcggatctcctgaagaaggatgtcgactggcgctgggagcgtcgccatcaagatgcttttaacgacatcaaagcgagcttacagcgcgcgccagtcctggtattgccggacgagacgaagcctttcagcgtagtctgtgatgcgtctgactacgcaattggctgtgcgctattgcaggccgacgatgaaggccgcgaacgggccatctcgttccagtccaggcagctcaaggcagccgaacggaactatccagtccacgacaaggagctacttgccatgaagtacgctcttgtcaagttccgagtgcacctcctgggctcgacgccctttgtcgtttatacagaccacgcgtccttgcggactgccgtcaacacaccgcatctctcacagcggatggcgcgttggctgtcattcttcgcggaatacaacttccgtgtcgagtacaagccgggcaagttgaacgtgcttgccgacgcgctgtcgcgccgacccgactacgagcttgctcatattagtcgggtcacgacggatctgtatgatcgcatcaggctggggtaccgagacgatgccagtctcggacctcttgtgcggttcttggccgctggctccgaagccaaggccgagtggctcacgccccgacaacgtgcaaggctgcaccgctatgagtgggttgacggtttgctccactatagggtcgagcccgaggatcctccccgtattgtcgtgcccaacgactaggatctcaagtacgacatcctgatggaggcgcacgacgctccatccagtggccatctcggccgtgagaagacgtacgcgtctgtctcgcagatgttttggtggcgtcacatgtacaagtgggtcgccacctacgtccgtacgtgcgagacgtaccagcgcgtgaggcctgccggtcacgcctcggcaccattgcagagcctgctggtcccagcgggctgctggaagtcgatgagtctcgactttgtctttggacttccggccgatgaccgtggcaacactggtgttgttgccttcgtgtgccgtctgaacaagatggtccacattgctccagttcgtgacaccgtcactggcgacgaggtcgctcgcctgttcatggactgtgtcttccgacaccacggtttgcccgagaccattgtctctgatcgagacccgcggttcaccgctacgttctggcagacgctgtttcgccttctcggcccacgactgtcgatgtcgacggcggaccacccgcagacggatggccagacggagcgcgtcaatcgcgtgctcgaagacacgctctgcagtatcggtgcggagatgccccgctcttgggctgatcgcttgcccatggttgagtccgcactcaacaatgcggtacatgcatcgacgggctttacgcccttttacctgaacgggtttcgccaccctcaggtgccactcacattacgaggcagtaccggggcttcggtcctaagtgggggagaggctcggaaaaccttttcctcccaactctcggacgtgagtccagccaccttgcggaagcaactgtcctcgtttgccgaagacagtctgaacataatcagcagggtgcgagacaccatggcgcaagcccaagataaacagaaggagtactctgaccgaaatggaagaggaaacatgaacgtgtttaaggttggggatatagttctcctagatactagaaacctaccgctaaacactgttagctcggtcgagagcaacaagctgaagcaccgcttcattggacccttcacggtcctcagccggcatggcgcggcgtacaccatagacttgcccaagtcgatgacgactcacccgacgttttacgtgggtcgtgttaagaggtaccatgaccctctggctctggctgccccgcaggaagcggtgggtggcccggtggagaagagcgcagctcctcggagcgcggcgtcgagtcgcggtaaggcgcctgatacgcgcgctggtcgtaagacggcgcggcgtacatcggagcagcatacgcaggggccccgtacgagccctggccaaactgggcctgatacgagtggggctgctgctgctccggatacggcgcgtggtcatgaagctcggcccgagctggtttcgcagggagtcgtaagacgacaggtcggctcgacgatccacacggccatggagactgcgagtttcttgatagagcgaggcaacattctcacggagccgctccacggcaccaggctaaccagcacgagcggcagcctcgccaccaagaccgacaccaagcgcgatctcgaggacgtacacacggtcccggagaagacgaatctcctcttgctgcagggccaccacctaactcggggccccagcatacggctgcgccgcctcagactcgtagccatggccgtgcgaggccaccgccggccctccttgatcgtaatgggcagatccactaccacgtggaacgagtcgtccgggagcggcggctccatcgcaagcgccagctgctcgtgaagtggaggggttaccctgagtcggataactcgtgggagcccgttgagcagctccaggcagactgcccgaaggctgttgcgatatgggacgagaagcagcggcagcttcgtaagtagtccttggcttcttggccggtacccggggcacggtagcagacgtagtcgcaccacgccctcgctcttcacgagctttggctctcgcctcttgcttcagctcggtcatcttcgggcggagcatgcgctagctcacgtattgagcgaactcgatgcggagctcgcgggtccaggatagcggacagagtgcgatcctcacggagctctttgaactcttggtcggaataccctttgcgctggacgtagcgccagaagaggtcttccacctcgctccaggtcatgttgtcattcggcttgacccagtggaaaccccacacaggatggagtccacccttgtccttcggcttcttgcgaagcgtggtgaactccttcagtgtgagcttgtgtggtgctagtagcacacaccgggcgacttcaacgtcgccaagaaagagtggctctttctcaacaagagcacgctcataggaacccctcgaggtgtacccgccgataaggccacgaggagccgagagcttctccaacagcgctgacgcaccagtgccaggctcgggcgggaagtagccctgcgggtacgtggcatccccgcctgaagaagactcgatggcagtcgtggcagtcggctgcctggcatacgcacccgagctagcagcgtggtattgctgctgctgctcgtcgaggttgttggagagctccttgggctcgtggacggcaccctcctcgtcctcagactccgagtcgatgaacagcttggagctggagccgcgaggcgacctggaagctgaacgcttcttcgccttggcctcggcggccttcgcagcggcagccgctttcgacgcttgggcacgctcacgaccttgtgccagcacctccttgggcttggagcccgcgtcgctcggcgacttctcggccacgaccccagcgtcggccatggcgacttcgtcgtgcgactgcttgctgtcgcctgagccggactcggcgtcctccgcatccttctctgacgaggcctttgcgtcggccgaggcgttggtcatgtcgcctgccgccagctccgtgccttcggcagcgtgcgtgctgccctccgagacgttctcgtcgtcgggtgaactctcaccggagtactggaccatcgtgcagtcaaagacggcggcttcccagtcgcgagccgggcttttatggccccgaggactctcctccttgccttgcgcggcgtcaggagacttgctccgagccccggcctaacggccactctccggcgtgctgctacgagagcgcaccacctcctcggccgccttcgtggcctccatcagcgcggacgactcgtccttggccttggccgccctggtcttcggccctacggcttgcggtttcggaggtgctttcgcactgcgcgcactgcgctttggaggcatgcttccggtcgacgtggagaccctgcggcttgctcggcgatgcgccagttgctctgtgaggcccgggggccgatgcgccagagctcgcgccgttgtcgatggatttcgactttgcgagtgaaatgtgagtcgccggcgtaacctcgctctgattggtcgataagatcgaatctaagtgggggaggatgtaacggggttacatggaatagtgaccctgtcactattccgggatggctacatcggtcactcccctggatagtgacccaagtggcctcagagccaacagatacattttgtatgacacaaactatagggaacttaagaattgtatgcaggccaaatctgtaccaacctataaacacattcagtcttaaatctaccgcttttcaagtcaagccgtccccttcagaccagggacacgtgaacggctgttcacttggagtttgtatactcctgcttcctctgttaagaagtgctgtgtgccccgtcacacagctccagatcacgaatggtttcgcctcgtagtaagccaaaatgcgataccaaaaacgcagccctccccatgagatcatccaaaacgaaaaaagtatcacaaatctgagtgaattgagcctcggactgatagccgtccagcagcgatcccacgccgcgatctgtgtagtttttctttcgtgtcgacgtagtttctgcctggacagtcgacaatagttgcttcaccttatacgtgcgaggatgatcgttagcgttcatcttgttggcgacctgctgattgtataggtctacaatagcccgtcgaaataataattgagatgtgttgtgcttgctatctagcccactaggtccaccgggccttccacttcgcaactcgctgtcgaacacgcacgcttcaatatactggaaggtacgatgcgtctggggtgcgttctactcgtggctttagccgcgttcattacggcatgcgacgcagtgacgaccagcaatcaggtgaaattgactccaaccacgatcgatagaggtctcggtgatcggaggcttctgcgaagcaacggggccaacattgatgccgcagatgacgaggacgaggaaagagcgtggcttatcgacatggtcaggaactttcttgcaaggaacgactttgatatgaccaagctgtccaagatgatggacaacgaagcgtacaaactaaaaatgttcaagaaatgggactcgcacaagcagagcatcgccaacattcgagaaaacatgaacctgcgcaacaacccgcacttcgacaagttgttgctcgactacctcaacaagtaccagcgcaaggcgaccaaagtggaaaaggtgaaacgtggtaacaaggtgcgccctgctggaaatcgcgtgaccatcaacgatgttccgtcggttcgtgagttttaacaagcaaacttagcgtgcggcgccgcgggagggtagtgctgttgagtatattcagtgtcaatggaagcgcttttaagcgctttttaaaaaaaagtgtcgatagtttacagccgatctaagaacacttcgttataataatgaacgaatcatcaccgagagtcagtcgcttttcacacaggatgcctacctgtctgggccgttgccttccgtagcaaacctgtgcgcgacttatcgactgggccagtaggccttttctttactggcggtcaggagcggcgcgatggcgagatggtatggacggaaaaagtaaacccgcctgcacccctcgtaccatccgcggtgggttttcgtcgtacagcacagccacgatcgcgctcacgagtgagtgaaggttgccggctccagctgtaaatagcccccccccatactcccgctagccacactctttttcctgtgctgctggcagctagcgtacatgtacatgtgagctcaaaggcaacttcaacccacgaattattaccaacactcacgatatcagattcgacggggtgggcgacgcgggtccggccattccaaaagccgcacaaaagcgccgaagaaggccgctcgtcatccctccgcgctacgtcccaaggccccactcgcctccacgtccactccgcaatccgccatggaagtccaagagcgaaggagcggccggagctccaacgacgtggccgacgccctcaagagcggcctgcagctctccaaccaggacgaggccaagactgaggccggggccaagactaaggccgaggcccagccaaccgacgcgtccgagggccaagacgaagaggccgcacgccgggacacgctgcggctggccttcgtgggcaacgtggacagcggcaagtcgagcctcatcggcacgctgatcaagggcgacctggacgacggccgcggctcgtcgcgccaggccatcttccgtcacaagcacgaggccgagtcgggccgcaccagtagcgtggccactgcctacctgggcttcgacgcgcgcggcgagcagatcctgtccaggcgcgcgggcaagctcatcccatgggccgagctggccaagatggcgcacaagcgcatccagctcatcgacctcgcgggccacgagaagtacctcaagacgacggtcttcggcctcaccggcatgcagccggacgtcgtcgtggtcgtcgtgggcgccaacatgggcgtcaagcgcatgaccaaggagcacctggccatcgccgtcgcagtgagtggacggccctgtatttgagtgagtgcaggttgaagttgcatgtactgacttgggttggtgttagctggagattcctatcgttgtggccctgaccaagatcgacattgcccccaagaacgtggccaaagagacgctcgcgacagttcgccaggccttacgacgctgtgagagagtgttgaagaatgtggtgggtggatattggagacttacttacgttgtgtgttgtgctttgctagacgggaagatggcgatgctcgtgaagacgacggagcaggccgtgacggcagccaagggcattccgtcgaaccgcatcacgcccattctgccgatttctaacgtcacgggcgacggcctggagaacctccgccggatactgtacgagacgtcgccgtcggcgttgttcaaggcggggctgtctgcctcgacgctggctacgaccaagtcgatcaaccaggaggaaagtatcgcggttgcaacaccagccgctgcgggggagacgaagaagaaggcaatagcggtggccgacgtggttgaaatgcccatcgacgagacgtaccaggtcccaggcgtggggttcatccttgcaggcacgttggtgaccggaagcttcaaggtgaacgacgcgctgcagatcggacccgactacaacggacacttccacaaggttaccgtgcgctccatggagtccatgtacatgcccctgaaggagcttgtgccggggcaaactgcggcgctttcggtccggtcggttaacaagaagttcgcgctgagtcgagcgactttccgcaaaggaatgattctgctgagcccggaaatcaaggtcgacgactacgtctctcgagtgttcgaggcccgtgtcgtgatcctgcaccaccagaccaccgtcaccgtcggctaccagccgatggtcaactgtcgaacgatccgacagaccgctgagatcatctcgatcgaatcgaaccaggacgtcatccgcacaggggaccgagcactcgtgcgcttccggttcatccatgcgcccgagttcttaaagaaggggatgcgcttcgtgttccgcgacggccaagccaaaggaatcggcaaggtcgtgcgaatagtccccgctgagcaatgcgagacgctgtgagcaacgtacgagagggagtgtattgataagggggacggaagattcgggtatgagccatttcatatttttcttgcattgcattcaattgcgctgcgtttaaataccgatcgggaggttgtcgctgctgttgctgtggaagagcaggtctagcatctcctcttcttctgctgtgtacatgtcttgcagaggcgagcgtcttccaagagtgaggaacatttgctcgatgaggcagatattcgactgcacgtccactgaaaccccttcaccctttgcagtggcctcctgcgtaaagtgctgcacgatccgttccaacagcggagcgacatagcgcttacgccgcttttcattgaggtgcttctccacaactacagaaaatagtcgatgtcagctcactgcacctacaggaagacaacgaggagggggtagacttacattcgtgaatctcttgactgttcgagctgcatttgttctcggtaatctaaagcatgtcgaaagagagggaaacgtgagtgaaaaccaacttcaccacaattcacattcacaatagctgcccacaaaatttgaagtttgtatgcactcgaacaaacctgatgcgtgagaaacttttgcacttccgccagcacttcctcgctgacaaaggactcattctgccaagaacaaaaatacgaactcttaggtgagaaaccacgttgtcaactcgcaaaagaaagatgtgcctttcttacctgtttcttggctttctttcctggagaaggtgccggtgcttcggttgggatagattctacagtcgaggtggtgacagttgtggctggttcgggtatcgacgcaacttcgcttactaccggggccgataccactggggtaacgacttcgcgctgctccactgcacgctcgatcgctggctcagtcttgtgttccacgtggttttgctcaacggtttcctccacactcggctcggtggccttcgtatcagcctccacaataggatccacaggtgcaggctcacttgctatgaccgcagggacggcggcttccttctcaacaacttcaattggaggattactggcgcaaagaggtgcctcgaccgtgccggcaggagtcacaacttctgcgcccccttcggatgcatgactcaaatgaggagaagaagcagggcgcttaggcactactgcaggcgtggtatcgccaccgttgttggttcttgcggtgacaggaatgtcagcgggacggttctcttcggtcggaaccaactcgggctcagcagccttcacactgtccgcgggattgctcgattctgcgtggtcgttgttgttgttgtctggatgggtggcaaccacctcagtcgcgttctcggtgagcttgtcattgatcacgggctcgacgacgtcgacaggctgcggttgcacttcagtgacttgagccgtctccataactggaatcgaggagtttttcttgaggtcgctttgcgctattgcagtcgaattgacaatgacaacggcaggctgagcttgccgtgggcaatccacccaccgacaaccttggcaacggatcctgcttcaaaatactcgagttgcaaagccacgagggcttcaacaagaccaggaatagcgaacaacctgctcgaataaggtagcgaggcatgatgaagcaattagcattctacattacgtttcatttttaacagcgcggtctgcttgagtagataaacaacagtagcaaaccccttgagcctggtgactggatatgcagcgacaagcgtcatcatacgtaccttacttggtcttcttgtcttctccagcattggcctccaacgcggccacagattcctggagcgcagtgaactcttccttcgcgaactccaagaattgcttggcgttgacgccgacgcacgggtccacaagcacgttcaggccgagattgtcgcccatggacaggatggccactccaaggttcacgtacggcggcgggggcacgaagccgtagaagcccgacacctggctcttgcacaagctcatttccaccacgctcgcacggacgttggtgacggccacggagatgcggtcagtggtgaagtgcacgatcgcacgcatgagcggcgccgggagcatggacaccacgtggctcgaccagtagacgaagaacttctccagcgagttcttggcctcgttcatggcacccgtgaccttgtgcagacgctcggccgagtcctcaatgcccactgggaggtcgatcaccagcgacgagaagcggttgctcgtgtggcggatgacctccgtggcggagcgcatgtccacggggatggcgcagcgcaccttgagcgtcggagccaccgagtcgcccacagccagcatcgtcttgcgcatggcgccggccaccacgttgagcatcacgtcgttcaccgtagcgcggaagtgcttgcccactgccttggtggtcttgaccgagtagatcatgttgtaggacaggcgcttgtgcttgcctccggggcgcttgaagaccgtggccggctcgcggcggaacactagcgccagcatgtgcgaggagatcacgtacagggaccagatgcacacgtacaggaagatcaggatgtccttgaacgtctgagacaggggcttgctgggcttcttggccttggggttcttcttggcctgcgcgcgcttctccagcatggcgtcgaacagctcgctctggtcgctgagcttggccatggccgtggccagcgacgcgccgtcgcccaggcagtggtgcaccttccagccgacgctcgtgacgcccgggttgcccttggggtcgtggatcacgtgcatctcccagagcggcttgtcgaagtccagcggcgagttgaccagcgccgactcgacgtacgacatggtggtctcgccctcctcgaccgtgtgctccaccacgttctgcgccacgtcgtagtcgggcagctccacgtacttgtagacgcccgtctggtagtcgccgcgcacgacgctgcgccagcgctggaagaaggcgtcgtgcagcaggcgcgcgcgcaggcgccccacgtagtcctccttggtcatgcggccctccacggtgagcacggacacggggatggacaggttggtcggcacctccgtcacgagcgtcgagagcccgatgttggacagcttgcgcgtgagcttgcgcggctgccgcgtcttgtcctcttcggcgatgtcgcgcgccaggcgctgctgcgagacgacgcccgagagcgccagcaccaccaccagcgccatcagcagcatgggcgcgtcgctgagcgtggggccattggccgcgagccgcgtgagcaggctgttctccatgtccatcgccgagcaggccgtgcgggtactgtagcttcggcggtcgcttggtgttttgcggaatggccgagtgatcacgtccgtcaggtgggccgtggatcccagccgtgacgcgccaccaaggccagccaatccgcgacaggtattcgattaagtgcgacatgggacattcacgtggctgcagtccccgacaaaacgtattgctcaagtgatatattgatatttaaagtagtagtgggtcataatattattatgattcagtaatattgtttagttaatatccaggttattaaaattatactaacctatgtgtgtaaattcgctattctttactttactaacattcttacggactatcgtgtgggtcatgtacaggatggcaacgcaacaattgaacctgtactatgccgatctgcaacatacgcacggatgcccccttgacagcaactgcgtatggggggcattttctatcatatagcgtggttatgcagaagatcacaagcgtattggacgaaggtgctgcaacactggcaaggctgcgaggtgacgccacggcacctggccaactacaagaattatctctctgcccggcaggcgccgccagtcagtgatagaatccagtgtcgactaacagcgatgtacggacattgggatcaggagcccgaggagtctcttagacggatatggtgggcactatgcagcattggatgtacgctgcaccaggtagtacacgaaggagcccaatggacggcacaacggcaggttgaaagtatgcgggctacgtgtcttcgccaactgcgtgcagtggcgaagaacgaaaacggacgcccagcttcaagaattcaaggactatatctagcgctcagcattgactgcttcgacgcaatgcacagcgaagcccccccccgaccagtggaatccagcccacctcgggcaccatagctccacctaaatgagatatgagatggcgctaataaaccgactgagattatgcaaggaagctaataacaaacgttaaatagactacctttctctctctcgctattatttactttactattactactacgactactatactattttcgctgactaagattgttgtagtgattgtatactacaatacgtcttagcaagactactacgtttggttgacatcaacaaaattcggtggttgtaatacacaagctgccaccgacaggtacgttgtccgccaggcacttcgccccgccgctgcaatgctcccgctggcggaatcggccgacaggaaggtttgacaaggccgctgtcatgaacgtggctcggcggcgctagtcgaccgctctatgcgcgggcaacttcagcgcgccgaatgccgaacgccgagtgcttggggcgtggcatgcaggttggtaaccaacttggttgcagcgctacatgtattgctgctcaagcggcctcgcctctctgccggccttgcctttcgatccgcggtccatgcgcgggaccagctcgctcgggtgacgcgagttcaacgaaagcgagcgaaagcagatgttgcgatctccaaggtgctcccttctccgcctgcgatgttgatgctccgctgtgccttgactgcctgcaaggattgccgatgacagcggtgatcgcaatgaaccagaggatctgtagagttgccgaccttagcgccagccgccactaaccacagagcttagcgccactaagttagcggttgctcttccagccccgtgttttccaggccgacgcgctcgcgacgactgaactcgcagtctcgagacagccaagcgcgggttcctggtgcagatgacgaaagcgagccaagagtgctctccacttggcgccgattattaccagcgcactggcatgagacccttcgtctgcaaagacgtgtcaaagggtgccgtactctctcgtccaaggtctggacttctcccttcgccactctggaattagcgccaagacactcgcgtcgccctcgtctaccagctcccacacatgaagatcgccgacctgctgtggtctcctccaacgcgcgaggccgtagccattcgcagagacccgccaggagccaactgcgcgaaacatctcgctgccggtggcttgtccaagccgctagataccggggcagcgtccaaggcctcgatgaaatgcgtccccggtcccgtcaagttcgccgtagtgcccgacaagaagcgcaagaagcactactacatgagcgcggcgcagaagcggcaccgtcgcgaccacgaggccttcgagtcgtgcgtgttcaacctcacgctggacatcaacaacctccggcaggaagtgatgcggctgctggagttccgcgatctgcaggtgacgcggctgctgctgactcggatgcgcatggagaacgagctgctgaagacggtcgaggccatgatacgcggggtcaaggagaacaacacggcggctccagagtgcagggtgtcacgcaccattaagagtcggggcgggtcggcacggggtgcggtgactcgggatggcgtctacgagttcgtcactcgactggacaaggcgcacttctcaggcgtcatttcgagcatgcaagcggtgttcgcggaggacgaagagagcggcggggaggcagctgcaatccgccgagtctgtggagctggcggctgtatgatcgaggtggcaggccagttcacgtttcccttcatgcaccacctcgcgatggcgctgttcccgcacgctgctggggacgagatgctgttatctcgagtgatcggactgaggatgacttgtccaatacgctttttcctgtatttcaacgcgcagcgagagctcgtgcggcagatggcgcacgccgatatgttgccggcgctgcgggaggcatgccccaaggagatcgatatccttaggaatagcgatcgattccaagaggtgcacgatacttgaggtgataaatggatccagaactttggagtgatgtttgctgtaattaattgcgatttccaatcgattgtattgaaatcgaagttgctcaaggcttcgtatcatgatgagtcgggttgtataatggttgattgtctcgcgctttgcgaccttattgggcttggccctcttcaccttcttcatcagcaggtagttgttgaggcagtctaaccagagcctctcgaacttcgtcttctcagatacagatttcacctgcgagcctcttcaaagtcgttcctgtgaagaaagttgtcccgcgctttacattaattaggagaagtggcttgcgaggcaccttggcaagctaaaacggtgtgctcccagcaaatgaatgttaaaataatttggtatgataaaactctatggctgggtagccaccatagcatttgcatttagaagccggaaacaccactttggcggttgtgttttgattggaagttcaaggtccagcaagatcaatgacggggtcctccgacgttaactagccctaacctcagtcaataacgttgcaataacaagaataacgtcgcccaaaaaataaatgacgcgtaaaatacgtgacaaccaaatccctcattcaggccggattttccctcagtattaaatacccatttgaagtgagggtttacctcgattaatttcgaacttaaacggaaagaagctgtactttaggaaagagcgagaatctaccgcgcagccacctcctggaaacattacgatagccctacgcgcccgctgttaaagggtggggcaagccaagcgacttcacgaattacgtaagtttgaccttgcttcttacaggtgtgcattatgttgcttggtatatgtacattaactttggtaatttgttattgtttatttggtaatgtattaaggctgttaaggaggcggcaaaagcggcaggatgccttgtacgggcaagctgaacgcattggcatcggagatggtcaagctgcgagagtttgcccccccccccccctcccgcgaatactaaaggtaacgttgctctgcgctctattgtctgctaatgttgctctatgattgataacactgcttcattaatattatgtctctatgttgttttgacgttggtattcagcttcaagctgcgcgccgcgggacgataaggacgtgcgggccgagagggaagcccacatctagcagagtaccgatgttaccaaaccactatcattgtccaggtccctgacataatggctgctgcttcgcgttgcttgtaattatgttctgtaatttctgtacacctatacgattgtcgttctaaacgttcgcgatgcatttgcgccctagcgcttaggtttaatcgaatgaggtcgacattatacgaaatatcgccgagtactaacgttgcattatgattagcgttgcgcattaacgttgctccaagataacgttgcgttatgtttagcgttgcgcattaacgttaatccaagataacgttgctttatttttagcgttgcacgttaacattgcccgttaatgtgatttgtcctactccctctgttcttatataaagctagtgttcaaagggtacaatgccttccccaaggcgtacttatagttatcaaccgccaaactattcaattgtattacctgggtcagacgcatccgccattacatgatcgctataaaacttagcaaagtactttacaataatgagagaggatagcactacggtgacttagccagcgcgtagtatatgaagcatattatatggaggcaggatcacgcatctgcatactatgcctataaatatattgagtccatttttaagaaaacagcgatgtataccgtatgatttagaacaagatcgcaatctactgctattaactggacgccccttcaacaatgtacgggaatctcgggaaaataataaattcgggttttcctggcgagtctagggatgctgaaactttgcatatctactaatatgtccatcaaaggagtaatgccaaagtggcttctccttttcttgtcccgttcggaaacgaggacatgatgtgcattccccccttactatttgtcagtcatcttgtcgctagtaatgcgcgatctttcacccctacctgaaaggtcacacaaatacatataatttttttatgctgcataaataacggtaagaaacatcgcagaggcgccaggtaacgccaactttgaggataaatcgctcgatatctacatacatttagcgcttcatacagcggcattacccaaactagatgcagggctttctatccatgtcggtctcaacggcgatgttcctcttattgaagagttaaattcgccgaaatcacaggtttccgacctgtcatgtgcattcatgaagggacgcccagttaaattacagcacacaactgatgaggaatctgtttaacgcttagcatggacatgtcggctggaacctgcgacccttctggtagattaactgtgacgatacatttatgcatcacttcgataatgttaccctagatgagtttgataatagattctacgtccatttgttgcatgtgtcgatgtgtggtagttattgtacacagtaatacgtaaaatataagcatgaacagctatggtttatcggctaagcaacaggcagcaattcaagtcttacgctgcttaagttccaaattttacagcgacgttaaccctttagctacgagctttaatagttcttgcgcaacgttaactggttttacctaacaattatgatacgcgattgacgatcgtactaagccttttacacttcatactgttaatatattgaagcctatttattgtaggtgaagtacacgcaacctggcaatgtagtcattgataatctggcggatgtactaagacggggggggggcaatgagagtataactgaatagtaaccgaaggtaatagacgtgcacctaatagttttattttatagattctgacacgactttatacaatagacgcggaacttccgtagtagacgcggaacttcagcgtctactattattccagattttctgagaagaggtcaactagtttgtaagagaataattttaaactagtcaatgcacgatggtacagcattgaatgcataatgaaagtatccgtacactcacaatatcataatgttctaaccagcgacgtggacctggtatgttacttgatttatcagtagggtttgctgccgtgcaatactgtcaccaacaacttacctcgaagaaagttaatgggcgatgtgatcgaagggcaacgttactgcgagagcaacgttatcaaaagagcaacgttaatggttacgaaaaaaattaatggtcacttttgaaacgcttttacgagcgcttgattagttatatactcttacaagaagaactatgtctcgttgtcgaagaagtacagcccagaaaaccattggtatccgcgataaaacgtacccatgcagagataaatgaatccgaacacattttgagcctctgttagcatactttgcgctcacaaaagtgtactcgtggtgtgtgccacttcagaactctcccaccctcacatctgaagtcctgagtgagcggctcgatagatttgcgcacctcgtgagccaactatgtactcattcagcacagataatacctcagaaataaattacctatgtgcaacacctgtgcaggcaggcttgggtggcggagtacgcattagtaggattccaaatcacaaaaatagccgtcgacacatttcaagccgaaatgtgtcgacaaaactgggatttgactcgagttttggtcggtatttcaactaacagtaaaccggctcaaactaacctacaggcaacgcaatcaggtgctcattggaaaggccacgctttccccagtctgtcctcgaagccccagtcgttcatgggcgtgttggctttcccaaaactgaccgagttaaatgcgcggcgagcgttctccgacatctggctccacatgatcaagtcttggaactccccactatctgacgtcacactcaactcgtggttcatcggccagtggctctcgtagaccacctttgcacttgtaccatccacggtgttagcgttcggaggggcatacttctggtagtcaccgtgagctgacggggtcaccgccaagatctttggctcggacgcgtccgggttgtcgatccacacaatgacgtgctcccagtcgtggcggtggcccagaccatgggaaggcgagtccttggggaaataccacgagtacatgatggcccagacgcctcggaaccacgtggagcgaccgtacacttgcgagttccagccagatcgcttgctctttgaattgtggccgcctgtagttttgagacctccactcgtctctccggcttcgttcaccgcagggtacgggtggcatccatttatgatgcgaatttgcggtttgaacttgactccggccttctcggaaatcgtgacaggctccggctgagcgaacggctgcaccttgtcgtggggaatccacacggccgtccacggacccggatccggcgtgggcgcgggagtgggagctggcgttggagcgggcgtgggggctggagttggggctggaattggagcttcagttggagcttcagttggagcttcagttggagcttgtgttggagctggcgttggggcgggcgttgttggagcaggcgttggagcttcggtcactctggggtcgggccgcacagtcccttgcgtcgggtcgagttgagcaatgggcgacttggtgtactctttcaggttcgaaaagtcgatgtactgcgctttcgagttggtttggctctgggcgtgtgccgaagctacagcagccagagcgacgcacacgatatgaaaagacttcatcgtcctctgaagttggtgattcgcttcggggtggaagaattgcagaatgagcgacacaactcgtcttgggcctaggaatttgccatccgagaaaaaacgaaggtctggcttgctgcagtttgcattgatgacgtgaatgtgcggtacgaagtttgtaacacacggcctctgcggtgtatggcaaccgtaggtctggttgtgctggctgagtggcgactcatttccccatgggatacacttcgcgatttgtcaccatagcaattgctgcatcataacatataatcacacaatattattgcagtctggtgctccacagtgccaaagtcagcgttgatggcaaggacgcatgaataatcatgaaagaccaaaccaatgtacagcatcaacaaagacagtcgaaagctagaaccaaatatctcttctctccaaacatctaagacagagatctgcacgtgtgtccgtaagtccgtgtgaagcccgtgacagcataataaggtggtccacataatcgtacctaggctgccgagcgcagcgaaggcggccccccaataggatattgcggggccgcaggacccgccccagcctcggtgttactaacctaacatagcgagtagtgcagcgagccgacgaggcgagcggaacgggtgcataacaactaacaaaaatataaattctatccgccgcgtagcgacggcgctcggctagaaacaaaaaaatcaccgccgcttagcggcggcgctcggctagtctacaacaactatcagagagatctgtccgtgtgtgcttccgtgtgtccgtgtgtcgcgcatggcgacaaaattcgggtggtccacataatcatacatagacagccttggacgccccattacaagctgccgagcgcagcgaaggcggcacccgcgtgcgttctagcgggccgcagggcccgccctacaagtatgtactaataacatggtgagtagtgcagcgagccgacgaggcgagcggaacatggacgattgcattaccgccgctgcgacgcttggcctaatactttttggaacaccagctattaattaaaatgggcccaccgagtagtagcagctgtcgctggggtcgggcaccccaccacttagtataatagcgctctagcgaggtttgcttcatataaacacatgctacgataattggtatggtagtgagcgatagtagtgcataagttagcgatagcggcggagagtaggcgatagcagctgatagtaagcgatagaagcgcatagtaagcgacagcagtgcgcgtacatatagaggaaggcgttcactgacacgcatagcatatttttactgtaattatttaggaatgtacatacttacgtattatagctacagcggcgctctgtgttcatcttgggggaatatttagctacacttgcttgaacgtgtttcgtatcttttttaaggatattctgacattcactgatctggggctttttattatagttcacgtagaaattccttctctaccatgttattggaccgatatacatgcaggaaacgaaattagcatagcgcaaacgcatagttacggggtaagaacttcttactttcaatcccttagctactgtagcgataggtggacctaccatgctatttactgtagtacaatagcaatgttggctcaatacaaacacatagtaagctatagaagcgtatagatagttatagcagcacgtagtcagcgataggacggcatagttaagcgctagcagcacgtagtaagcgacatgaacgtgatagcagcacgtagaaagctatagcagcacgtagtaagcgatagcagcaacgttgtaagtgataacagtgctatatatccatccctaaagtattacagtaaaagtatgctgttcatgttagtaataatctcgtgcacgccttccgctacgtttactcttatagctacagcggcgctctgcgttcatcttggggggatatttagctacgcttgcttaaacgcgtttcgtatatctttgcgttaggagaatgcgttaatggggtagtagataatattcactgagtggaagccttttattatagtttacgctgggattccttttctaaccgtgttatggggcggatatacatgcaggaaaccgaattaacaaagggcaaacgtgactttataactatatagttacgagtgcgaactctctatatcttacctactgtaatgcaggtggtacacttaaatggtaatgttcgccgcgtagtagaataataaaccattgccacgtctaaaacaatgagttttgaagtagaccacgcagtagttagcgcagcccgcagctacgttttggcggaacatacgaaatactaaaacgatgatgtatactcggtatttatataagatcacaagcacttaatgtaatgctaagtacaggaacagcgaagcgcatactttgattatctgggcttatagcctgattacaggctgtacttactaaatggcatagcctacggaccaaataacagaaactatggtgactttgctgaccacaccatcgatagcaatatctaccccgccacagcaagtagtagctcatgttaatgcttatttcaactacgtttacaacaatggcgacattgtagtcgtattaactaattgtgtgtatgtggacccaatttacaacagagtaccgtacaaaatagaatgtttaaccttgcaacatgcaactacttatagacaccctgatgtaggtctaacggtggaatatttacgaagcaaacgtcactctactgatagtactttcaacctttttttacctacacacaacgaaattcaaaccttttgaagtggataaaagcccaccggagcgaagcggaggtgcgcggccctaactactacgactaaaccacaaaaccttccgccgcgtagcggcgctagtctacatatataccaaacaatgcagtttctcagacctcggccatcaaagattaccatcgtagtgacagtgacgtaggattgtaatttcacacatttacttgttgcagcaagacgaacatgttttgaggaagaagtatgcgaccaacaactacatgtagaatattgtgtgtgcgactctacacgtttgcaatgaagttccgaagttaggagatcggagcaacgctgcgctcgcgataatgtcaattgaaggtcagatgataaccacatacatatgattgtccgccagatggctcagccaaaatagtcaacagagattgcgtgaaatgcaccttagatgtacatgtacctgcttcaagaaattttgtcacaattaaaaggtacagctgctaccgtatgtgcatgtgtacacatggtacacaataatgtgttacagtactccagagtcgctgctggaattttaaaatgttcacaagtcgaagacctgtgcttggccccggcaaaaaacttgtaactttccaaaaccgggtaccaaaccgggtctctctttcttaattgtaatgtttaaggtaatatctgccggaatcgggtacccgttaaaatttatacacattatttaccaaaggttgatactaatcgttcattcttgaccaaaaacctgcgttcaaacacttacggacgctccagtacactatgagagcgtcatggcctcgctgaaggcgtatcaatttgcgccataatcgaccaagcttagctgaagatgaccaatatgacttgtctagctgcaggctgcattttttacatgtcaatttgctcaatactcaatcgcttagccgaagatgcccaacctcgtgtctctcgccaaaccaaccagctcaactcgacagtgacaggagcatcgttcgtttgaattaggcttcctttacctgcgttgaagtgcccacttccaaggacttggcacattaacgtatttctccttccgcaatttaccctcaagttaaaacgtcaagaccagcgcaccatgcatctctccttcattccgctagctctctcgtctgatcgttagcaaacaacatagtactgaatgagcacagtataccttacctgcaaactgaatgaaatagctctctcgttgctggcgtcagcgcagccattggacgctgaccaaggtgttattcccgggcagatgctgcagctgcgaagcaggcgcagtagatgcccacgttagaatcaactagagagttcagctgatagtgctcttttaaaatccttaaaaggattaataacaacacaactttgggatttactcgattgttatccgttatcatcgttcatgaaactattcgccgacctgtgtatcctcccggagcaacgctccgggttgcctatacatgtaccacagcacttgtaagctaaaatttactcaaaatcaatgaaataacaactgacggattgctctctttcctgtgtctgttcgcgccaatggctgtggcttcgttttggcccgctctaaattgactaaaccccatgaatcccttttgtgtaaatttgtatagctggaatgcatgaccgcgcccttaacttctttcgtgtcttttgcatggcaacttcgccgtttttttaaaaggcgctacatcagggtttgaaaacttgcctccaattttcatgttacattattcttgcctaccccacgttgcacacaaatgaagtctacactgttctcccagaccaaagcttgcctcgcttgacatgcaagcttctgacgaggtaagaagaagacccccaaaaacgccaacgcgttgatgcaatggttgagaatgagcgccacaagaacatcttcgcgcccttctggagagtctgatacaacctcggcgatgcatctttgggggcgccgtcaactgcacgttaatcgctgacctagatcgctcgtatccggccgagatagccgctcatgattccgcggaactacgctccctcctcaaagcatggggcgctcaggattgcttgtcttacgccatgcccagtgcggcagaccgggagcagctgcacaagtttcatcagcagcatcacacgttccggtacaaggtccatgatgcacatgaaacatgtcgcctagatagatggtacagcacactcctggatcgccgcggttgaggttgttcaacccgcggcgaaggctgatcacgacggtgtcttactccacctaagatctccgtcaaatccgctacgtgtcaacaagccacctcgaatatacccggttccggactatgcgaccagcacggtcgatgcgtgcacacatggcgtcctggatgcattgttcgaccgcgtctccacggatgttccgaccgcggaggaagctgtgacgccgtgggaaaatgccaaacgggacgtactacggggggcgcgtaggtgtgtccgccaagctcgcaagcgcacataccgacagaagctggctaggctcttgcgccaactgcgcacagctctagctgaggaacgtggtgaaggcagcgccatggcttcagttacggcgcgtatggatgcgctaacactggaagacaccgggcggggatcgcgagtggacacgatcaaacgggcaatcgcagagttagggatcgaacgcggcaagaagaagatgaagcatttatttcgaagaagtgcgtggcacgaaggcaagacgacgagtgcattgttccagactaccgcgacgaagtttactgataacgctgtacccactttagtgccaagtaaggggctccctcaacgtgccgtgcatgataaggcggacacgtttgcggacgcatggtctccgatttttaaccaagaagaggcatctgcggaggatatcgatgctgccctcacatggacaaaagatcatcgcgtgcctgatgacttgctaaatgcggtggctgcagacattactgagtctgaggtttctgctgctattgatgcctgtcatgctgggaaagcgtgcggtcctgataccctcggcaatgattggtaccgcgacttcaaggcgctccttgctcctatcctgactattttacctaaccttttgtgggcctactttggctcactacttcagcttacacgtgtgcgcgtgtatgtgaggaagcgtagcttagtttaaatcagagttaattatactcgggcctccgagtatagattaatctaaataaacgatccaaataatgtttttggggaaaatgagaactgctatttttgttttatgtttctgacttcctctaaatgtaataatctaaactaggaatctgccaacggctggttggcagaattccaatgctatgcatgtctctcattggttaaaagatgccgctctcaaccaataggaatcctaaatgtgtatggaccacccgtcgtggtggtcgtaaatgtatgtagccttcggtatgtctacaccaaggtcgagaaagtctttcgaacctctcaaacgtcgtgtctgttagagttacaagtgactgtagccacttgtgcgtgtaaccctgttacaccatccccctctcaaggttagacgcgccgagtcacggcacgtcaatcaagcggcggtatccacgacgatgctgttgcggaggagcagcactttgatccgttaacgaatcaaaggcgcgactactacatcgggctcttccacgagctccggtacttctccagcaagaagacctcttctcgcagcaaagtgcctgagtggcaggcactttgtcaaagttggaatgcttttgttgagaacttcaacaagaaaccggctgcttaccgcgagccggttaagcatgcccgtgagagcttcgagacattctcgacgcgcgggcggctggagcagctccacagatcctctgtggacgctggtattctgtgcgctgtgcccgaaggccaacagtgcacgttgtgtcttccgggtgcggcgcgcttgagcgaccgcgacctaaacgggtacacgacgattcgtgtacctgcgagtctcagggatctccgtgccaagttcctggcacgcgaggaacgcgatgatcgcgaaactccgggcgctgcaggtaattacagcgctcgcgctacattcacgccggtagtccgtggtgagcttcgtacgccctcatcatttccggaacgtcctgcaacaggacgtcccgcggttcccatgtatattggtggggtggaaaccctcgccaacgaatacgataacgaaccggctgtcggttcgttttcgggatactatggttcacaatacgctcaacaatccagcgtgttgagccgtgggcgtcgcggatcggaggcggcggtggtgggaacacgccccgggtatggtcaacctggagttgaccttggcccgacgctcgaggagcgggtcgctgctgtggagcagcttcagagccgtgaggtcgccgctctgaagcaggagatggcgaccctgagagctcaagttgctcagacctcgcagaccgcgacggacatctctgtcgacgtgggaggtcgcgtcgtgcgcttggctcagcgcgttcacgcgctggagcagaggttcgctcccgctggggcttccgcttcgggccagccgagctaggtggctcgtgctgccggtatcgtttcagccgcccgacgtataaggtcggatggaggcgcatgctagatggaatatctagcgtgtacgcgttgtcataccgtgccaacaccgtgaacggcccgatgaagcgcggagcgagcttgctcgccccgaagtcggaaacggcatgtttaggcaggttttgagttgctaacaaaaccaatgaacccttcttgaattcattagtgttgcccctaccaacattgtctgcgttcagcttctgtaggtcgacagaagctgcaatagcgtcttggactaaccgaatgacggcttgtctgcgctgcacgaaattgattgcgtccgagctgaactcgttcagctcgtttctagcagtaggcccggcctctgcgttcgtcttcgcggtgtctgtgccctgcacagacccgttcttcttcttttagctcttgtcggcgtctgtgccctgcacagacgcgtgcttcttgttcttcttgcgcgtagtactgtccaagtgtcagcggcattttgcggctgctgtgttgcagtcgtagatcctcccccacttaaggaaggagccgccatcccgagtagactcgggaggtgtgggtgcctgatggcattcacgtagaacggtgtatgcccggtcgaggcatgcaccgagttgttgatggcgaactccgccatcggcaggcactcgctccagtgttggaacgagtgagcgtagctcttaagcacgtctacgagcacgcggttcacgcgctcggtctgcccgtccgtctgcggatgatccgcagtcgacatcgaaagctgactcccaagaagtgtaaacacttcttgccaaaggtgtgcagtgaagcgcgggtcccgatccgacacaatgtcgatcggcatgccatggtgtttgaacactatgtcaacgaacagacgcgccgtctgcttcgcagtcacttcagtgggtaccgcagcaagatgtaccatcttgctgaagcggccaacaaagaccacaacgcgcgtgttcccctggctgtccgggggaagaccgaacacgaagtccaaagacatggactgccaaaactctcgtggagttggtagtgactgcaagggagcctgcgcgaaaggcgcaggcttcacacgttgacaaacctcgcaagcacggacgtacttgcgcatccatttatactggtgggcccagtagaagtctcgcgtgagaagaaggtatgtcttctcacggcccggatgccccgcagtcggtgcatcgtgatactcgtacatgatcctgagtcgcaggtcatggtcattgggcacgacaacgcggtccgcgttgtcgtcaactgcactgtagagtaataacccgtcgtgcacccagtaacggtgtgcacgagcacgaagatgcttcggcagcttctgacgagcttggtcagaaggcgctgagccgtaggccagcaagagcttcgcgtccgcgtcgtgcgtgtacgcgaccttcacgtcgtccaacagtgacgacgttggggtgctcgatcgcatggcatcaatggcattggcgtcggcatcagtcgtggcgtagccaggtcgacgcgagagcgcgtcggccaccacattgagtcttccgggtttgtactcaacccggaagttatactctgcgaagaatgagagccatctcgccatccgttgcgagatgtgcggcgactttacagccgtccgcagcgacgcgtggtccacatagaccacgaacggtttgcttccgagtagatacactcggaacttcgcaagtgcgtacttcatggcaaggagttccttgtcatgtaccgggtagttgcgctcaactggcttcagctgacgcgattggtagtagacgacacgatcacggccctcgtgatcgtgctgcatcaacgcacatccgattgcgatgtcggatgcgtcacacaacatggaatgggcgatcttggtcggccaccgccaagatcggcgccttattcaagccccgcttgaccgcatcgaaggcctgctgacactcagcagtccaaatccactcggcgtccttcttcgagagctgtgacagcgggtgtatcatgcccgcgtagtccttcacgtatacgtggccaagccaaggaactgccgcagttccttgacgtttggcggcgtcggccactcattgatcactctgacctctcagggtcagggcggacgcccttcttctcaacgagacacccaagcacgggtatctcgctcgccccgaagatacacttcttccggtttgcgtagagcttgtgcttgcgcatgagcgcaagcagctatcggagatgcaccttgtgcatctcaacatcactcatcccgtccgcagctcggctgtggacgaacacatcgtcgaagtagctcggtgcgaagtcgcgcaccgagcgcaacaagtgcgtcacgcacctgttgaaggtcgaaggggcgctcttcagaccctgcggcatcactagccactcccagagcatgccgctcggcgtgctcacagccgtgagagggatattgctctcacgcatgaggatctgatagaacccatcgcgcagatcaagagcactgtagatagtgctcctggccatcgaatcgatgattacatcttttcgcggtatcggtgtctgcgccggtatcgtcgcatcgttcagcttgttatacgcatgaacgatgcgccatccgccatgtggcttcttgacacagaacttcggggcactgtgcggggacttctatccccacacctgtccagctttgcgacgacttgcaaagaagtcgtcgatcgccttgacctgttctcgcggcagtggccactgccgcgtgacacagtacttcgtgtccggcacgagatcaatctcgtgctggatacccttgtcctacggaagctcctcagggatctcttccggaagcacgtccgcgtccttccgtagaatcccgtagaagggactcgtcttcagcgagtcccagctctgctcctcagagcgctccttcttagtctttgcactgagattgacctcagtctcagtggtggtctccatgaagaactgcctcagttcttcattctcgctcttcgttctctcggcgtccgagagaatgcatatttgctcgatgcgtccatcgtgcaagtcacgcgcgaagcgcttccagctcatgactggaagcgaaatcaactccgacgcttgcgtcggaggattagcgagaggcatctccctgtacctgaatccggcacaggtacgcgtcaagacgttcaacgtctcgacgtccggcttctcagcctccgtctacccggcagagatttcttgtagcgtctcggccccgtgccgagacttgcgcagtgaccttcgcatgcgccgtcttcttgttttgcggagcctggctccgcttggttcttgacctcgtccaggcccaaccgtggacgggtgttcttctattataccgccggcgggtacatcccgcgggcgaacgacttcaagcccagcttggtcgcacggcgcttagtcgtgcagccccgctgcacgacagcatgcaagtttttccggtgcgagacgtttgcaaccgtccgcaccacctgcagcgtcggctcccggagccgccacgccatcctcacctcgacgcatgttattggcgaagccctttatttgaaggggtgcgtcgactcccggagtcgacgcgaaattctttttcgcagcgacggttcccggaaccgtcgcgactttaatacctcgacgccaaccattggcggagacccccattacggagggtgcgtcggctccccgagacgacaatcaaatcacccaatccatcgactcccggagtcgacggcgttacgtcaccttggctcttattattggcaaaaactgatccaatcagttttgcgtcagcctccacggctgaggcgtgtgactcgcctgcgtcatccgcgcccttcgaggccggagactcttccttattccctgaaaagctggtgtcgacctccgaggtcaacacattttcttcattagctgtcggcggttacgccgacgctagctgctcttgcgcacgtgctcgcgcgcgcccagggcactccgggacagcgtcattaggcgctgtctcgagtggggagtcgcgcgcacctgtcggtgcgtgcgtagcggcaacagggccatcgctcactattccgctgtcgcgaccgaagcgcacgagagtgcgcttctcccaatcgatgaccggatcatgccgtgcaagccacggcatgcccaatacaatgtcaaacttatcgtccagatccaggacgataaaggtctcgacaaactcttgatcttcatacgtgaagcgcacgcgtaccatgcgcttctcggtcttcacgacggcacccgttgccagtcgtacttccaacatacttcgaggtatctttaaatcctcgaagtcaagccttgatagacttcgcagtcgaacaaagttcttcgacgagccagaatctaccaaagcacggagagagctgcttgctctcatcgagttcacgttcaggatgacaaggtcaggcttgtcatcttggttcttgcagtgagaatgaacctcactgggggctgcagtcctcaatgtcgcgtgtccaaggtcgacacgcggaacgcattaccagtagggcgccccgcgcctactggtgtccagcgtttttgtttggttgcgacggtgcccggcaccgccgcgatagccaccctgctggtgcacgggggccgtgcactcccgagcaaagtgaccgactctaccgcaacggtagcatcgcacattgtttccctgcgagtgctggggtccagcagttgcagcactcgagaggtccatgggttctgggcctcccgtcctcactaccgggcgtggctgtggcctcgtcacatgtgcatgtagtttagcctgccgcaggctaaactcctcctgcattgcaagagtaattgcagcttcgagagtactcgggtactcacggaagaggtaggtcttcacaggcccatctctcagtccctgcatgaacgtgacgaccttggtcgcctcgtcgatcggattggtcacgatgttcgagaccaagtaccgcgctctctgagcgtaagcatggacatcatgcttgccctgctgcaggtcgaggaactccgccctcgaccggaactcgttttgcggtggctcaaacgcttgtctgagctcttccttgaaaccctcgtacgtgctaaagcacgtaggatccgagagtcggcgtccatacgcccaacttcttgcacgtccgccaagacatgacatggcgaacgcaaccttcgacatcggttcgacgatacgtcgagccgcaatggcagtgtcgagttcgacaaaccaacggaggagaggttcaccctctcttccgacatagttgctcacattgagcatcagcgattgcgcgcgtggtgtcgtcccggatgacaccgcggtagtagcagcaacattgcgttgctccttcagggtgaaacccagagcaacaccgtgttgctctgtcggcgttagcgtacgcagcatcgtagctacaatcgcctcaccaatgactgttgacagtcgttggagggcctcccactctggacccgacaggtggggacagtcagcgcgtgcaacgtgagttgcatgcgtagtggagctttccatgggcacctctgtatccatgggaaggttctcagctccgcgttcgtgcggtgacgtacgaactcaggtagtcggtcgttggacggactacaaagtgctaccaggtgtagtgggcctactttggctcactactttagcttacacgtgtgcgcgtgtatgtgaggaagcgtagcttagtttaaatcagagttaattatactcgggcctccgagtatagattaatctaaataaacgatccaaataatgtttttggggaaaatgagaactgctatttttgttttatgtttctgacttcctctaaatgtaataatctaaactaggaatctgccaacggctggttggcagaattccaatgctatgcatgtctctcattggttaaaagatgccgctctcaaccaataggaatcctaaatgtgtatggaccacccgtcgtggtggtcgtaaatgtatgtagccttcggtatgtctacaccaaggtcgagaaagtctttcgaacctctcaaacgtcgtgtctgttagagttacaagtgactgtagccacttgtgcgtgtaaccctgttacacctttggtatcgggctggcgtcttcccgccatcatttctggaggccgacattttttgtctaaagaagaagggggatcaatcaaatccactaagctaccgacggttggctttattgaactcggactacaaaattttcactcggatcctggctacacgggtgagcaagacgctgccagatcgcgttcaccatcaccaaaagggttttgtgcctggccgccaaatacatgatacaattgacctgttcgaagccgcacagcacatgacgaacttggatgaagagcagcgagaagctctagcaatcttactcgatttccacaaggcttacgattcattgggtcgacgatacctaattcgagcactggaagcgcacgggtaccccgcccaatttgtccgcgctattgcgagcgttcacgccggcacgcgagtgcgcaatggccgcagatcgagatgggttccagtcacgacaggaatacgtcagggctgtcctcaagcgcctttactattcattgtggcgctggacccgtactacagagcaattgagtctgccaaagggcttcgaggcatccggctccggacggcagagcgggaaatcgagttacgagtcggtgggtacgcggatggtactgcggcctatctggcatctccggcagaaatcccccagttactcgctattacgcaaaagttcagcaccgccagtgggcttagtgtgaacgcagcgtagacggttgttatcgcgctacattctgcaggaccgcctccagcaattagactaccaggggatctcaagttccaagcggtcactaatttcacgagatatctaggtgcacacgtcggtagcagggtttcgaccgacttcacttggcacacaacggtgactcaactgaagacgcgactgaggcttgcttctatcaagttactgaccgaggatcaatgtgctattgtcgctgccgctgtcgttatcccgaaaatcacctccattgcacgacacgcttggccgaccacgagacaagtgcaggaattacagcgacgcattcataattttgtgtggttcggtttatttgaagaaaaggggtcttttggacgaacatggattgccgcggacattgctagcctccctcgttgccacggtggactcgctatcccacaagccaagctcgaacagcttgctctggcggcgaccgaagtggttcgctgggcgctctccagtgacgagtcgatgtttgttgttggaacgatcctccgactactgggtcgcttggatgccgacgctacttacatttcactcagcaatgcggcccggacccctttaactgggttcttccccacttcattctgggatgccggcaaggcaatgttggtagaactggactcgagcagcaccccccatcaccttcagcgtcggtcgccccgttggccaacttgatcagggcactcctcccttcctctgacgaatggcgtgacggatcgtgcccaattgacgttcgggaattgaaagggccagcgactgggccgctccatcaatggattcgaaaccagaacggcatttttagcgctgaatggctaccgtggatggagattcgaagccttgtgttatttgacggttctggagcgctgacagaaccttcgatttgtcactccagcatagcggatcgtggaactcgtgttggagatattgttcggtggtatcacgtcgaggaaacgctcatggcattccaaatagcaaagactgggtttgatgtctccagtccttcgcaagcttacagaatgcacgttgcgcagttaattgaactcctccttctcaacatgcgtgagctgacttatggatcgatgaatcgtaacgaggtgcgactactgacgaaacataccgatcacccttatgcacttgaagtgctgcttccggattcaactatggccaaactgaccattatcggtagccctgagacacgctacttcccagtctctggggtcacaaagctcagcagctcctgggtgcaattcaagaatcgctaggatccgcaacagaggtcactgggtttcatctccaccctcaattagacctcctcgcctgtttatgggcggggaagcggcgatgaagctgcacacggaaatcaatcaagctacgagcgattgatcgcagcaccaaagacgtcacggctgctttggaacagcggatgagcgcctggaaagatgaggacccggtgatccgtgcagctctaaagtcgatttcttgaaagcaacttcgacgttggccaggttgaatgtatggggagagcggctcgtgtatcgtctcaaaactcacagtgttaaatgatacgatcgactacagcggagacttgggtgcccgcatgactcgtgcgttgggcatccgtatactaccctcacacacattttttggcaatgcacttctgcggcgacgttatgggcggttttcatagcgcgatggactcagctcgaattagaggcaaccttacgcaaccaagcaagctgtttcacgttccaacttgctactctccctggagggtttattaaccgttcgaaggaggaattcttttggttatcttccgagttcaaggaggctactaatctgcaactagatggagcggcagcggactgctggaggcttggagttgttacagtcctcaaagtaatttggaaatggaggaatgatcaccatgctgctgttacctcgctggcgacctcgaaatacaaggccattctcagggctcggctccaggactcgtattgcactgttgaaaacacatatcgcgcagctggtcgatcgcgggctcacatacgggcaatacatgctgtcattggagcactcaatggacattggaaacctactttgttccaaatagagggtgggtcggcacagtttgtgttatttttttacggtggatctcgtgggaatccaggaccagggggcagtggagcagtcatcctgaagatcgacagcgattctaacacgggcaaagctatatgggcgactagcatgtcgtacgcggcacctactactacaaataaccaagcggagtacagggggctactacaaggactccttcatgatcagcgaactacaacattgagaccactacacgtcgtgggagacagtcagctacagtcagctcattttacgacatcagctacaccggacggcatcaaaagctgtccatttgcgcactttgtatcaaagatgcagagtgattgtcgacaaatgtggtgttcgatcatggtctcatcacctacgagccttcaacaaaacggctgatgctttagccaatctggcaatggacacaacctgcagcaggcagctcgcctttgacatcggggcggaaccgaatggagtctggacagctgctttggacttctttccaggagacctacaacattagacggcaggagctgcaaatgctgacttcacacaaacttcagcggcatcgtccaccctataacggactgtaccctagaagggtgctcgcatgcagacgacgtaaataagcggagggaggaactttgtattagaagtcgttagtttctaagtgactacaatacaaaaaaaacctcggcgatgttgtagaagttgcttccctcgaacagaccgaccgagttggtttgtatgaaaatgtccaccaggaaatatagcgacagggtaaggccgaccatggcaccctccgagccttcctggatgatctccgtcagcggaaccacgctactgagccagccgatagcggctgaagcgctgctgaacaatgtcatgatccgatagaacacggggtcacggaggatatctttgctcacgagaatcgccacaatcaactgggagacgataagcagccctgggcaaccagcgtagaagccgcgccacgcgcagttcatgaagtagtagcgccacaccagcacggtaacgatcaccatcccgtagtgcatcgcttgctgcatgaacacattgtcgctccagcccacacactgataattaaggagggtccactgaaacagatgaacagtacgaagaagaagaaagttcgattaccgattatttgtcttctcaactatcgtagtagatagagacttctgcttcaataaagaacacctgatatatacaaaataatggatagtaatgaaatatttcgatagcattatagtcaaaattgtatgtgtgagccaatcagcattcattcaatataaagggttataggttttcttgtgttctttattgaagcagatgtctgtaccaactatatgctgtgaactaatcgactagcgtctgaaagacgatacctgctcgatgattcagatgtagttggacgtggcgtattcggaatgtgtcggggtggcgtcgatggaaatctccgaaagaactgctttcagccagctttgtaatgatcttcctgggtttctgttgtttaggcttctccgcacgtctcagcagtcgacggtagtgagcaccgaaagtattgtagattgcggtgatagtgctgtcgagtgattcggggtccttctcctcaaaacagtagtgattgcgttcggtccatcgatggtgcagtagttcgctacagtacgtgacgaaaatatcatcactactacagtagtgacgatattttcgtgtagtgattcactacacgcactacgatgaagtcttcgcgcgtatcccgaagtcagtatatatcgagctatgaacacaccactatagtactgtagagggccagaagttacaccgaatattctattatacagctaacccctctgcgcctctgttcctactgtggagatatcatcacaggcagtgtaagtggtcgccttacaccctgtgttttgaaactacttcagctgatgccagtaccaactgcccgtgtccattaagttaagatctagagaatcttgagtcaagatcatcccgatctacaagcgctttcatggttttcaaaaactaccatatgcttcttttttagtataggtcctgcataccctctaggtcatagagtgagaacggtaagaatatgagtgccatcttcactggcacttgaattatagtcgtttgaaagtttttgtctaaaaccgattagtgcagcacgaagcggcagcttacaaatgaccagaaagctgactttcagtctaaaaaacacacaatcgtacacgtagctttacgcctaacccctaaacttgcgtccgtcttctcctcggcgtctgtgttggtatctgccttggagcttcgaaggagtctgcggtcactggggatcaaatccgctgctgctgatacttcatcgcatcttgctaggtatgtggccacaccacgagcaaaacgaagcgtagacgcatggtgctacttggtttcctcagttaaactcgggacctcttgccgtgtatcttgcagagcaaattgtacatgtagagtaaaatgtgcggtggacgaaccgttaagcagcagcaaaagacccgcggcgcacctaacgcgatgcagggcgtgttccacgttgggacaatctattacaggtcatgaaacgatttggtcacgccctttggtcacgctatcttgggatctgttggagtcgtgttctctgcctgccccgccgtgtgaggcctcaaaactgcttcaaactgctttagacgtgtcgtactgaatattagttcatgttcagacgcttcgaagctgctatcatcgccgatagcgagaacaacatcgttttttcgtccgttttcagtgtagaagctcccaattttggctcaattcggctttaggagtttccgaacagctaattagatcccgtggagagtgcagctttccctgaagtgatccttcatcaatggaaagtgtgctcgagtggtttctcatacttacatgtaacactagtgtaagtcacgtgaccaaatcgcttcatgacgtgtaataggcatcaccttactcggccgctttaccgggttatggtagaccggccccattgtcatattatagtatcgcagaatgcatgctggtaccttgaagtggcaatgatgtaggcctgatgcgggatgtcagcgcctctccggtgaaggttgtacacggtacggtccagactaacggagaaagagaccaacatgaccagaacaatcaaaacagcttagctagcttagacacatgttcagtagcttggcgtactttagatggctgactctctcattaacctcgtatgtgcgtgaaagcaacttgagtagaagagccgcttgcgctcatgcatctgcggttgtggcgtgtttgtgacacatcaccacatgttataaagactcacaggaacatgtaataaaattacccaacatctgtgccacaagcacgtcacaaatgcttgtgacagcaacggtgccgaacgtgaaatcatcaatctttgtacaattatctgtgcattttgcctcattgatggatggcgttcctgcaacgttatcagccatcattttacaacgtcacaacgcttttacggcaacgttagggccttattgtgacgtttttagcaacatgggtacatggtaggacaaggtcggacttgtaatttatcggataaattccttgtcctgtaataagtaaggtgtgaaggtgggcaagtggagggcgatattgtttggcaatgaatgcgataatgagtcattggggacgaagtcccccttgtaatcatgagactccgttttatggagtttttacgtctcttatatacgctccgccttactttttacattaattctgcgaatgggttagggtcacaatttagaatcgctcacacagggaccaaaaaatgaaaaaaaatacctcggttaaacaacatttgcatgcttatcggaaggtggtatcggcaagctgaactgacgtcactatctttagatgccataaaaccagagggtcgaagttttgaaacagcaaattcgaccgttagtatggaggacatcagaaatagacttaaacgtggcattttacccttatttgtaccctcttaggaccctctatttagcctatttgcctttcaaaccttatgctgtcgtaagaagcgtcgctctgcggccgttggtaagaagtctgcggcccttcgggatcgcttgaccagcacacaacagagagtccaagcatcaacaagcagagcctcaaggaagcgccaacgctacgccaagtagcaagcagctttgcatgctgaggaccgggtactgtcgagcagcaacttctctaaattacattgaaggctatgcgcggatgacgagctggacgatgagctggggtgtacgagccggagtccgtgtcggtgcttcttggtagcaacaatggctctcttttggcccgttcgagctcgccttcagacagctccaagtccttcctgcacgctaaaggcgctgattatttgctcctttctagtctgcgttaattcattcattgcgttgctcatgaaaagatgttcgactaagcaaatgcattagcccactcaattacagttctgttgggtcgatctcgggcgtcacagctctgctttgataccctacatgcatgtgtgatggtacgatatcgggctcaactacattattttgagctagttatcgttcattatacttctctggcccacataagaaacaacacttcggttttctggacataactatttacaaaaaatcgtttggcgactcgcaatacctcaaccgaaagctgcgcatttgctccgtttcacgctatgatttaaaaaaaacctagcagcagaaagaaaagagaaacagccttatatctgaagtccgttttaggcaacattaggttttttagcgaggtgccgtcaaaaattagcgatattagaaaataaaagatcaccgtagtcacgagtgactgctttacccttatgtttggttgtcgatgttgtagcgcctgttggagacgagttagaagggctacagttttgaggtttttctacgcgattatctcgacatgcgcagacccatttattttggccaatagtaagctgtaacagttgattatacccaatcatatgtgacatgtggtccacatcaaattgaggtttaatgccgaatgttgtttcttaagtgggcccgagaagtatatgtttccttattgcgctcaacgtgcatgaggttatctacctacgcgtgcagactaacagttttgaacagccgtgcatgtcatagtcgcgtcagcaacattggccattgcggctgggtgcagatgacatctggaggaagaatttcaacatggatcgcgaaaggttactggaataattcgctcgtattttcactctgaaaatgaacacaccacgaaattgaaacatcgaaagttaaccccttattcacttttcgttgtgccagtgtgcacattctgctattacacttacctaagtaagtaaaatacgagtgttctggcattcgaaccacaggccaggtgtatcagtctaccgttaataacaacgtatgaatggtacttatgttgcttgcaaaatagccagcaaatgggggagcgtgaaaggggaaataaagcgctagaatttgcaagcggcttttgtactcaaatcccacaagtggggacgtcgtccaacctctgtggtcagcatagttttgggggtcgacccctaaagcaacatgagcgcagcgaccgtgatgctccgctagttatagtgaagtagacactgctgtccaccctcgacgtgagatctggggccttttcagcggtagctggtcgtgccctccgcgaccataggcagccagctttttgccacctgaatctcaagcgcaccgccgtcgcagatcaggaaacgcttctagaccagcgagctcagcgtgtcgtcaagcgagcggtcggtctcctccagcaccagattgttggaaccgcacatgaacatggagttgaacccggccaagatcctgcccatgcatgatgaacatggccttacccggcttgatggtctccattatcttgaccaacttgtggcagtctaccgacttatcatgtactaagctcgttgtgccagcttctccggggccggatcacttatgggccttgcgcacattgatgtccatgcttgtatgaccttgtcacacaatttcgtcattataccgatgggcgcgcagcccagcgctctctacgagtgcgtacggcacggcacctccacggcgtcggcgaaaggttacaagtagcaaggaagaaaggcaattgtacacgcactagtggaatgaagcgctgggtgctggtgctagaccgatcgaaggaagctgcggaacagcttgcgttcctttccatccattggtcgattcacttcaacttgtcgcttaacatgtaagttcgcacctttaaccgtacttagtcgacttttggcgcccgatgtcgcaggcggaggccgacgacggcccgcgcgaggccgacacgctgcgcgtgctgctgtcctcggacaaccacctgggctacgcggagaaggacccggtgcgcggcaacgactcgttccgctcgttccgcgagatcctgcagctggcgcagcgcgagcgcgtggacctgctgctgctgggcggcgacctgttccacgagaacaagccgagccgccgcaccgtctacgagaccatgcgcctgctgcgcacgcactgcatgggcgactgcgccgtgcacttccaggtggtgagcgaccagagcctcaacttccccaacttcggcgtcgtcaacttcgaggaccccaactacaacgtcgagctgccggtcttcagcatccacggcaaccacgacgacccgtcgcgcgaaggcggcggcgaccactcgcagtcgctggcggcgctggacctgctgagcgctgcgaacttagtgaattacttcggcaagagcgacaaggtggacgaggtcgaggtgttccccgtgctcatgaccaagggcaacacgcgcgtggccgtctacggcctgggcaacatgcgcgacgagaggctcaacaggatgttcgcgcagcagaaggtggtgttccgacggccggccgagcacgcggacgagtggttcagtatctttgtgctgcatcaaaacagggacgacaaaggacgcggcagcaagaactgcgtgcccgagagtgtgatcccggactttattgacttggtggtctggggccacgagcatgagtgtcagattgacgttcaggagagcttgaagggggatttcttcatcacgcagccaggctcgtcggtggcgacgtcgctcgtggagggggaggccaagacgaagcacattgctgtgctggagatcaacggacagagctttaggatgaacacgcgagagctgcatactgtgcggccgttcaagatgggcgaggtgattcttggggagattgaggagctggacccgaacgacccggatgtggcggaccgtattagagagtatctggagggacgagtgatggagctactgcatgaggctgaattggagcaggaagtgaagaggagagagcgagcgagggagcgtgagcagaggcagcaggagagcccgttcccgctcccggatattgggaatggagctgaagaagaaaaggacctggtgctcatccgtctgcgcgtggaacacacgggcttccaggtgttagtgaaccagcgatttggagccaagtttgtggggaaggtggccaaccccaacgatatattgctgttctaccgccggaagaatgatcggattaatgcatcggacaagaaagccagcgcggagttggagaagtcgctgctgggccgccctgtgcgccccactccgttggctgctgtgacgattgaagatatcttgagcaagcagctgtgtgtgcctgaacgcaagttagtgttgctccccgaagcacaacttgaaatcgcactggaaaagtttacgttgaagaacaatgcgtcggccattcaggagtttgtggacagcgtgctagacgagacccagcgcgaactcagcgccaagagcgatgccaagtctgctcaggatattctcaccgttgttggcaaaaagaaggagcagaaggacgctttgctcgcactgcagaaagaggaggaagatgaacagtccgcgaacggcccagcagcagccggcactccatcagctgacgggtttcagtccaggcgaactactctggaagacgagagctcgactaaatcccctaaaagcggtcgcttcgggacaccgagaacttcgaaagcgaagaaggcagcgccaaagaagcccgttaggaagtctgtcttttcagacctcgaagaagacagtgatgagagccaacgcaagcggaaacccgcggttcgaaagactacccctcggaaagctcctgctcgctcagcaagagccaaggcacgcaagactgtgctctccgacgacgattttgaagatgaggtcgccgccacagctgaagatgacggagacgaagattttaagatggacgaagacgacgatgaggaggaggatatgactccgcggccgacagcgaaacctcgtggtagggctgctcccaggtcgacgaaagccaagaaatcgccgccgaaccgtaagaggcttcgcaagagcaatgatgacgacgatgaagatgaagatgatgacttttctcccgcgcccaccaagagaagcgcgcctgctgcagccaagcgtccagcagcgcgtgaatctcaagcgagcgatgtgcttgatctgtgctcggactcggaaccggaacaaccggcaccgaagaaacgtgccaagcagacgaagacacagacgaagatttctcagcagcacaagatcgatcacctgttcaagaagcagcagccgaaaagagaagaggacgaccaggtcgaaagtgatcacgagttcacccaggttgctcggcaggcaggcgcacgtggtcaagacattgttgggcagtcgcaatcgcagtccgagtcacaggctggtggaggtacgcgacgcaaacttccgctatcgatgattgcagcctcccaatctcagtcccaagacccgaagcgagctggaggtgtcgcccccgccgctcgtaaaggttggggccgctctcgtcgctagcaacagctcactcaatacgtaaaaggaagttatcaactcgtaaggaaaaaggaaagaagtggctgaggtcagccatatatttcacctaatgccacgcatggttgctcgtggctgaacacgtcgatagccctttgttgctgtgtgtatgactagagagggtagcgctggttgcatcgtctcgtctcgactcgaactctcatgtattcttcttcttgggccttgtcaacttgatttccctgtgctctcaagttgatgccgagtgcgcgtccgttcagcttactccgtgctctccagcaattccttgggaggggtcttcggcaaacttgagttcagctcctcgtccttggcgggatcctgtcgcacccacgtcttgttctggaaacgcggccgcatttgcgatgaaaagtacgggttgcgcggggcgaaagcgggagcgccagcgttcaagccggcgttttgcggtgcggcgcttccttcgcctccagccgcgtccgattctggcttgccttcacttgcttttgcttcctcagccttggcaacgttcgggttgacccacttgcggttctggaatggtcgagctcctcgaggtccgttgtgcattcctccagcgggaccccgagggaagccgcggccaccgtacggcggcatgccttgcggcgggaaacccatcgcgtacgggttcatagggccgtagcctggcggagggtaaaacatcggacttccatatggctgctattagaaaaataaacgcaaacgataagttaatcgtcaatatccttttcaagggctctgcttgagtaacaacgtaccggagggaaaccgccatagcccatcggaccgccctggaaccccatgggcggacccatgcctcgtccgtagtcttgcttgtccttgaagtcactcttgtcatccgacggcggcaaaggcggctgcacgtcacgcgagtcgctgtttctccgcttgccaccgcgtcctgcatcctccatgtcgtgatccctgtctcggtcgtttctccggttgccgcgtcgatctccgcgctggttctcatcgccacgatcgcggtcgcggtcgttgcgtctcttcttgtgcgatcccatgctgtcacgagcgtccagctcggcctggtcaacgttaacaggcggtcccagtcgttgcgagagtctgccgccactttcccggtcacttgcccgccgcttgttcccactcgccttggactcgtcgcgctgatgacggtcctccttggatgacggcgacttcttgggcgctggtttcttctccacgacgccgaaacgctgcgctcgtcgagcaatcacgtcctccatgtcggtcttcgacgggttcagcgagcggattgtgcctcggttgccgcccagcgagacgatcttcttcttgggcggctcggaagacgacgaggagagccccttcaagctgataacgcgcttgggtggggcctctgcgtccttctcttccttctcttgcttgggggcttcgtcctcagcttgaggctgctcagcttcaggggcctggacctccgtctgcggctcttcggcttgagcttgggcctcgaacgtgggcagcaggagactgagccaggccgcgaactgctcggccgactcctcgccgatgaagtccacgaggtcgtgggcgatctgctccatgttcttcttgttgcccaccatgacgatcacgtattcctgcagccgattagaatagatagatagatacacaatggacgtcatgccttccgctccggtcttttgtacgtaggtaggtaggtaggtggcgtccccctccgtgccctaattgggggtcgtttccaccctcttttggcgtcctttgggtcttcttttcaacatgcatgtacatatatacacatacaaagagagcgactgactggtctccggtctcagtcctcccctctctgtcggctgagcgctgttgtgttccttcccccttattctctctctctctctctcttgttgcgtccaacggtctcaatgctctgtggtggtggctccctaaaaccgcgcgcaactcgctctctaacaggcaggaaaagaaggcgaaaaggaacgccacccactgaggtctagctaaggtctaggttacgcaccgccatgacgttgtccacctcgacgcccagcatctccgtgagcttctcgcgcgtcctgctcgcgatctcctgcttccacgcgtcggtcagcgccagcgggaacacgtaactcttggcgtacgacgccatcctggtcctccctgatcctttcgactctgccttcctttgtttggctcagtgggtgagaggtgtggtgtacaccacggacaccctcaactggcaacgagaaaagtaccgtggccgctgtcgttttgtgggcctatctatacatagccagcatagagcgcaagggagttcttattctgcggtactctaatcaagcaaccatcaagttgacttcagaatactatgctgagtgcttgtactgtagtcatgctgaatctgagacgtagggatcagcttttggaggctgtaagattttatacagaggttccccgcaagaatgacacgtcactctgaaaaacttgtgaaattcggtgaggcgcttttgttgaggacgacaacttttggcaacgactaaagcgtcttgctcgaaaatgcctttacatttgcacaatgcctgttgcagcgctgggtcggtggattgttgctcgtggagtcccgaagcgctacgctgccgatgggccggccacgtatggcgcggaactaacggtgctccatgtcggcctgcgcgcgagcagcgattctggcaaaacagccgacggttcaagccccagctcgccgcgaaattcaaagctgcaccgcaacacatgcgctgggcgtcgacgcctcgcgcgcagttttgttggagccgtcagcggcttcaccgaatagggtcacacacgctgtcaagggctctgctggcaagcggtcatttcaatgccaatggcggacggggcttgctgatacctaacgtacactccggcagtgccttgtccacgttttagtttaacgtgttcgtacgggtacaagctgcattgaagcacggcgcgttgaagtcgacgtccgctcgagcgcttgctttttccgccgccgaaggtctgcccggcgcaccgaagagaaggaaatctgtgaggacccgtaaagtcgtaactgagctaggtacatgcacacgcattatccacagtggctaaaagctacgagctcttcggccacgaaagagaaagagtggcgctgctttccatcacgcaagccaaagatgtatccacctgcaaataatttgaggcaaaactgaatataatagttgcgagtgactttcaaacaacaaaaaatagaatgagggcatgttctccaaaacgaaagtctcaacatgcactgccccaatatggagctcctagcgttacgacccccgcagcagcagcagccccgacacttgtgtttcgctgtccgatcgccgcagccctcgcgacaaaactgcgatgcgatgcggttcggtttcgcatccggaatcgatggagagtcagatgcctttggggctttatcatcggatctgctttggccgtgctctgcatggagctcggcgttggaaaagcgcctcggtgtcttgctttgagtatggggcgggcgtcgatcttcccaccctgaccctgccctgctctccgtctctgctcgaccgtctatcgatggggagggcctgctctcctcattgccgctttgtccaggcgagttgacactgtcttcctcttcagacactgtatcgaccggtaggtactagcagcagcgatgtccacccaggacgtctgcggcgtggacgtgcaggcgctgtacctgaatgacccgggcaacaagaaggagcccgcgggctacgtcttgtgctcggaaatgggcaacacgtgcatgaagaacggatgcagctgccgtagctcgaacagcgcgacggtcaacggcacgaccaaatacttcggcgtctgcgtcgtgctcaagaagggcgcggactgcgtcacgagcggggacgactatatcacttgcgccacaggttcaggctcctcctccgcctcattgatctcgtccagcaccacggagtcgcagaacgagtcggggggtacctcggtgacgcccgccccgaacaccaaggccacgacggagagcaactcggtgcagtcgacgtcaaccaccacgaccggttccagttccagcggcagcgtcgacgccgttcaggtggcgagcgccgcggccgcgtccagttccatgagcacgacggtaatggtcattatcatcatcgtcgcggttatcttcgtggcgctcgtgtcctgggtcgtgcgcgcgtactgcatgaaacgctcgacgccgcagaagaagctcgaggggaggcggaaccgcagcacgaacggcacgcgcttcgacgcgacgtcgcccaccaacgtctcgagcaggtcgtcgcctacgccgtccttccccgcgttcgatcgacgggcgcgcgctgcgcagtcaccaactgccggccaacgcgcgcgcgatgaggcccgttccggccgagggaaccccaacacgcagcgtggaggccgtaacacgccgcgcgcgatgaaccgcgagccggcacctgagcgggcacgggagattgacttcggcccccgtgagcccaagtctggccgtggcctgaagccgcttgacctgcagattgccatcgacatgaagcgtgagcccaagtcgggccgcggcctgaagccccaggacctgatggcgtcgatgcccgcgcctggaatgcagcgccccgaaccagtctcagcacgaggccgtcgaagccccgagcagcaccgcgaacccaagtctggacgtggacgcagggaccctgacgcgtacggcccggtgccggtgatggagcgcgaaccagcttcggcccatggccgtcggaacccggacgcgcgtggcccaggaaacgccggtatgtaccaggccgagctgccgacgcgcacgccgccgcgtgaacagcagcgcgcgaagcagatcgcgtctcccaagccgaacaggccaaatgcgcctgagcctcctggaggaaccgtgtacggccgcgacacctacgaccgagtggctcagttcgctcatctcgcagcgttcgaggcaccgcctccccctccgcctcgaccgcagaagcccattaagccggtgcccgttgccgacccgctcccgaagtacgcaagggccccggcgccaaacccgaacgcagcgcgtcctacacccaagcagcaccccgggttcaccattgacgagaccccggagccgatggactatgacatcctgtctccgaagacggccaggtcgttggcgccgtcggtcgcgtcgtcggccacgacggtggtggcgcccggacgcaaccgtccgaccccgctgcagcagaaccgccggccaccgcccccgtcgtactaccagcccgactttgacgagagcaagtttgacgaaagcaagttcgacgagagcaaattcagcgaaagcaagttcggcgatagcaagttcgacgatagccgatacgacgaaagccgctatgacgagagtcgatatgacgagactaggtacgagggcaagaagaacttccacgccaccaacagcttcgacgactcgttcgtgagcgaggtgagctccatggcgtggtcaggcgtgagcgacgacagctactaccacgcagcggcgagcaacacggcgcgcatccccgtgattgaggcgccccatgacgacgatgacgccaggagcgaggacgcgtactcggactggggccactcgacgcagcagtcggacgccttccgcagcactgcggcctcggacgcgtccttcttctccgtgaactcggacttcgccgactcgaaaaacgtcttcaaggagagcgagttctagtcgcagacgcgcccattgcaagtagatcagtggatattgtaacagttggggtggccaagtaaataaagtaatgtgctgtcatccatctatgaggaactatgacgttctactagtcagactgaatcggccacacacacggagccaccatcgaattccaccgttggatccaaagttactcatcgaacgacaggcgtggtcttggaataagctttgaggctttccgcatcatgcaatcctcgcctaatcgagtgcctggcgctagtgatgacgagctcttctgtccaagttgtggctacggctccgttgcaagagtccgcatcgtcgatgctcactattggcacgacacttggagtcaaaactctcatctttgcgcgtgtgtgtaaattgacgtcggaaggagtcagcagaaaatagagaagtacatgcacacggaagcactcaaaagagggtcctctcgaggccacactgactcgaagcgttaggccattcccgcgtgtggctcgaacggggttgtcgtgggttccactacttccaccctccgcctagagccgtccacctgcatttgtgtcatcgcttccgtttcgatagttttcgacattctgtggagcttcacgcgcttcgctggtcagcaccaagcagagaggaattttcccgttcgtgtgtgtaccgagtctaccagtttcacatttccccattcgcagtcgaagcgagacgcaattggtctgctaagatggcgtctaccccttcagcttcctcctccacaggcaccgtagaagccgcgaagatggacgtcggcgacacaatattgggctcgggcagctttagcgctacggattcggagacgcaccaaccgttagcagggtcgcctaccacagggaccgacagtgactcctctagtatgagcacacctctgctagtggggatcatcgtggcctcggtgatcgtcttcgttgcggtcctgttggtgattcgatcccgacgtcgacggtacgagcccaagttgttctcctccagcaacgcctccgccttccagagagtgaactcaacgacagctcatgaaaacactacttcagacgcactcggatcaagtggagtgtccacgatcgtgacatccccccagcttccttatatggagacgttcaagctgccaaggtcgtcaacgaaggacgcgtccggggaccacgtcgttgtcgatatccctgaagttcacactacgggtaacgccgcagcgctgcctcccatgcgcgggactcaagcatctcgaacgaccagcctcatcagtggacgctcagtgtttttagcctcgttcctcatgcgtggcgggctgcgctcgtcacttccgagtctcgcagcgttccgaggctcacgcagcagcgagataaaccagacgaacgagtctcaagctactggtccgatcgtcacagttccagtggctcctgctgccagtgcaccgccacttcctcttgatgagaggcatacggacggcgatgcttggagggacctttccgagacttgctggtctattggcccgggcagtgacagcgagactgaaagcgagcggttctccattgctgcaggctcatacttaccaagtggagcgctggttctgaggcctcgccggttgtcgacgctctcagacgatatcgctgatattgatgaggacggagttcttcatttggaggaccttgaggtggactcgctcgatgactcgtctcgacggcgggaccgcgttatgagctttatggatgactggtctcctcgaagagagaggggcatcagcatgctcgacgactcgtcccctcgacgagtacgaggtctcagcgcgctggagagccgacggaaggccaactcgctcgctgacatcgtagacaccaacaagtctggaggctcctacttctcggtggactcggactactacgacgaaacgattaaagactgcagctcggtcctctttgacgacgacagcgacagtgacagtgacagtggtgacagcttgcgggaggaagaattctagcaagctcaagtgttattgaaattagtgtacagtctctcaatgtattagatgttctgacggctagttagttatccttctggacaacagctcccctctgcctccactttggcagcactcgtgtcgccaccaactcccaacacacacttagtacaaactctccaatgaacaagccaaacaacttccagcggaacgctgtaggggtcgacattagttgaaacgtttcgttgactgcgtcggagttgtcgagtagaaaccacgagttgaccaccagctcctcaaccagcaggactgcaaacagatagtttgtgtagaacggcagtcggaacgggtcgttcacgttcagggaagcggctgcaaccacgtactgcagatgcacaaacaaccacgtgacggtgccttcgtaggagaatctgacgtttacgaggtcaagattgctgaaaaccgcgcagttcgaagccgttctgtcacccgccccctttacaaactccaaagcgtcctcaatggagcaataccagctcgactcgtgactcatcaacactaatgccaacgcgaataataatgcattaatcacgatgtgacccaagagagacgcgacgatctcaagcgagaacagtgttgaaggcggcctcgcccgagttaacaccttcgaagggcccgtgtacagcatgcacattgcgagagctagcaccatggtcagatcgtcccaaaagtactgcatatccgtgagctgcatgtcgactccagcccaagtgccaacctgcgccagcacacttgccatacccaactggatgatcgggtatagcaccatgtacttgaagcctaggaaggaagttgctaacgcacaccgaccctcgcgcatcaacactggcacgtctgagatggccttggtcttgctcgtgaacggcgccacgatcgacgcctcggcgctcgatagagccaaccccacatgcgcagccttcaacgccccgcagtcattcgtgccgtcgccgcacattcctacgaccaagccaagtgagatgagctgctccacgatccacgccttctgctgaggtcgcacgcgcgcgaacaccggcgtctgctgaataatgcgccgcactgtatcatcgccgtagtcgtcgcgcaacttgtccagtgcagcgccagtgatggccaagtcgaactccgccagcaccgcgaccatgttgctgctgttgaagcccgaccactccactacgtccgagttcttcacatcgtccaccgacacgaacgcagtctctccagtatgctcgtccacgtctaccacagcgattttactcttcatcctcatctccagctcgcgacacacgtggacagcagtgagggcgttatccccagtgataacgcggacgtcaatatctgcagcataaagctcgttgagcatgctcttggattcaggcttcagctcgttcttgaacaaggcaagaccctcgaactttaccgcgctttctacttcatcacggttgttcacatcgatcagagcgccgggtgtgagctccttgacgccgaagccaatgcagtagaagccgtcgattgagtacacaagagctttgattttaagatcaggtggtgttgcggtggagatggcgctcacagcctctggggagcccttgacaacgacgaatcgtttgccagtgctgatttcttcgacgactgcgctggatcgctggcatgcggcatcgaatgcaaagcgactgacgatcccgtagttggtgccatccggcgctgtcacaatcgcaatgtacttgtcattgggaggagtggggaaaaactccatggagtagtgggaagccttgaacatcgccagctcaagggaataaccttgaaacgctcccccatactccgacaagccatgacacgtcgccatccccaaagtgaatctggatttcgccccagtagttgaagcgctagatgagaattcctccatgatagccaccccagcaaagctcagatgttccttagtgagcgttcccgtcttatcaaagcagaaacaggagagttgcccgcatgagttcacacgctgcgagtcaatacagaagataccacgtcggtacagtcggtgcatcgaaaacccgattccagaggtgagaacgaggggcaacgcggggggaacagccacggttatgagatccagggaatcaacgaacgtctcgctgaacgagttcccgacgtgaaatccatccacaagccgcttgacaaacgccacgatagccacaacccaaagcattgccaagtaccgataactatcccgctcgaactcgaaagtgatctgcttggggaacaaaatgctgcggaatagttcccctttgcccgtggagaagcccgtactgataaccacacccttgcattctacatcgctctcgaaaactcggatgatagtagacccggcatgcaaaactgacgctttgtgcttgtctcgagccgaattttcagtaatttgccccgctccagtcgccgcttccttgttgacaggcaccgcttcccccgtcaaagccgcctcgtccgcagtacagccgccagatagcagtaaagtatccgcgcacactgggccttcactcacgaggacaacgtcgcccggaactaattcactctcgtagacgctaaagattatcgatcctcgcagaacttgaaagtgtctatcgctatgcacgagactgcgcagtcgaatactgttggacacctccgagtagatctcgtaggccagcgagactgcagacatggacaatatcacaatagcatacttggtgtagtccttgagcagccaaaccacgatgctgaatatctggaaaatgtagaacggatgcaccagcttcacgaagagtaactcgctgactctgggcttgtcgatggcgatgcggttcggcccaaacagttcgcttctggtccttacaacgtgttcgtccagtccagtatcgacccgacgctgcaacttgcccagatcctctcgaatcgtggccaggtatcggcggaacgcgccccgctcgtagtcgaacacgtaccgctgcttcttgaactcgaaccagacccacggcaccttggtccgatagtcgtcgtcactaggagctgggtggtgtacggtgcactcgacccatcgagcctgcagtccgtctccgtcgatatgaaccagcatgtagtccgcctcacttacagccgactgcggcagcgcaactcgagccaagcgcgtgaaaatttgagggtaccagacagagataatgatcaatacgccccaagacgccactgcgagcgcgcagtagagtatcaagcgtgtgcgggagtacacaaagggcatcatccgaagatgctcattgggcgcgtacaccaactgcgcgcgctgacctgccaggtcgtcgatggggaccagcaggtgctcgcgcagactcttcatcatcgtgggagtgctaggaattgaggggtaccaaaggtcgggcactgatgaagatccccgcgtcgcttcatgccaagtaccaagaccacgtcatgtattagttcaacggctgtcatacaacttcattgtcgtatgctacgagcttctcctcgcaaactccctcaattcctgcatcgcctgtgcaaagaaccttgtgtctttgtggtattgttcacgcgcgttcgcccccatggccgcgcgctgctcagtcgtagttgaagccacgaacttcttaacagattcacaaatgccttcccccttgactgcagccaggagcccgtcggcgttcttcaatccgtgcgcgtccgagtagttgccgcccagcatcccattgcgagcatccttctcgatcttcgtcgggatcagaacgcccatcgcgttcgaaacgatgagctcgttcatcggtggagcgtcagtcgtgacgataaccgcgccagcagcacgcgcttgattgatgtagtggccgtagccttcggccagactcggacacatgaggaacgcagcttcggccgtgagtttgctgaaggcgagtcgatccatcatgccgaagtggaggttcacagtgctccgactgtaccaccagacccacttgtcataggccccctgcatcaggtagttgtacgagccttcgttcgcgtacagatccagcggcggcagtcctggagtggacgtccagcagtccagcagttgcttcgtgcccttccagatactcgtaccggccgtgtggatgaacctcacgtccgagaagtccttgggcgcgacagaatcatcggccaggcgcttgcgcgcgaactgcgcttggtccgaggacgtgtgtttggtgtaaaacacctgagcgttgcgggggttgccttcctcctcgaaccagcgcgtgacgcggtcgtagcatactttggtcttgcacagcacgacgtccaccctccagtagtgctcgggcgtgagctcgaccatctcgatgttgggcatgaggtagatgggtttgttctccggccagcgaggggaggacggcacgccgtcccagtagtgctggaagaagatcacgggcgtcctggggcacaggtcgtagtagtccacctcgcgccccacctccgggtcgaacagcttcacctcgagagcccacacaggcagcagccgagacttgaggtctggcatgaatacagaagaagcactcggttagaacaatactataccacaccatcaactatactagagagctcacacttggcgtaggcgactgcgtcctcgcagtatccgttgccgtgcaggccaacaggcaggaaaatgtccacgtcggggcattgctgcagcttgtgcagcaggtcggggtcgtcttggtggatcacttcgtgggggttggtggctatgccgattggcccctggtggcctggagccccgtactgccacggcagcaccgcgttcgtgtccgtcacgcaggactcgtgcagcaggctcaagtgcagcagatcctcgtccgacacctgccagtcgtggctggttaagggttcgatgaagtcggcctcgggtccgtgacgtcgcaatgtggtggagtgaggcagcgacagcatcagcgacagcagcatgaagagtcccagggtcagcagcagcgccggcaggcgatgcagccatagctggcgagagcgccagcgcccaggcttgtgaggagggcccctccacttgttggtcatgacgagggcgaacagccgcggtttcgaatatgaaggggggggggagtcgacggaagcgtagtacatgttgaagtgctgaactttatgtatccacttcctctctggacgatgcattcaagtcgattagcgctagtcgaccaataccagagcaatgtgcattggactaacgagctagatacaaccacgatgtacattcttatggtacttttaggacagggacagtaaactaccagtagactacgaagggttgatggatctctcaatacatggagcccacgtcaagcgacagcgccgatctggaggggagttccgagtcgtgcatgaactcgctggcctctgtgctgcgcagttcgtactcggtgctgttgaggctggagaagctcgaggcgaagctcacgaccgtgttgagcgcggcgtcttcctcctcggcaatgtcattcgtcgtgtagcgctctcgggggatcgtcgaggcgtccgagtctcgtacagaagaatcgctgtacgtcgcagacaccagtcggtaggagtcgctctcgatgtcctccgactcgtacacgcgcggactcggcggactgtcgtactgggagctcatgctggacgagaagctcacttgggtgttggaggtgtcgaagatcgggttgtgactgggcgaacgcagctcggacaccgacggaccgtgagacgcattgaacacggcaggagccgcgactgcagcactcgactgagagttgtcgaacctcacgctgctatctccagccttggcgctctcagaacgcacgtaggcaccggacatcttccgtcctcgagcttcacgcgaccggtactgggtcctcgaagctggagcgtcgaagtcgtcgtcctcgtcgagcacgacgatcgaagccagcggcgtgttgtcactcgagtcgaaccttgcactggagcctccgtagtgtcggctgtggccgtgacgacggtaccttccatcgagtctcgacgtcactggcgtcgctacggaggatccgtcgtccgtgaattccccggagggggtgccgagcttcttcctcttcctggctcgatcattgcgtacagccacgaacactgcgatcgctgctatagccgcaacaccgcacatgacggagacgatcaccgccaaccgcttgccagaccagcccgagctggccgatgtgcccgtgttggtctcgagctgagtggagccatgactgtttgacggtcggatgatgttttcttcttgagaggcagtagcagcgctagtttgcgagggatccgtcgttcctgctatgttggtgatcacgttgtcctcgttcgtcgcctcggagtgagactcctctggggagagtgtgaggctctcggtcggggtcaaagtgatgccctcctcgtcggagctgaagcttgcctcaacggagctggaggccgtgtcgaagctactgctgctgccgacgtcgacgctggcatcagcacttgaactggagctgaatgacctcgatgacggtctgactcctgcatcaccaacgtcagagtttgaactggaagaggagtcgccgacattgacgctacgccccgcggacgatgaactcgagctgtcttgcgagtacgaactgccgcagaactcttgctcggatcctgcgctgcttgcacacgtcgtggcctctcccgatccgacgcagacgacccaggccaccgtcacacccgccacagacgtcaccttcttctctcggcatgaacacactgcacaaaggtcttggtcactccccgtagcgttcacacactccacgtatccagtagggaacagcgccccaggagccgccgatgagttcacgacgtagagattctccgccgcgtagtcgcacgcgctcagtgttgtgtccgtggacgaagctccttggcaacttacagcgtaaagctgcaccaatagcccgataataaggccccaatgcggcattttccttgggtgtatctcgagcgaaatcgtaaagtgtgcgagctctgagctgagctaaagctgagagctgcgactaacccccggcgatatcagtgccttgacagctggggcgccgcaccctcacctcgtggtggatctccgagggcgtcaatgtggcaagaacgtttcgccggctggagccttacgcctcttgctagccgcccgcatgtgcctcggtcacagatggcctgatgcgactgtgcctgtcgtagcgagcgagactgtggcggcaaccgcttcgactagtgtgggcccctggtagtctccagaagtgcttcatactacccttggagagagcgtggggagctgaccactgcggaaaactcaaatggattcattgactattttctgaccatcggacagcagcgagttgatccgagccggtcacgaaaacaaaaaagttcattgttcgatatcgccccgggctgggtaactacagtgtagctattgatgcagcttttgagtcaccctcgtgcatgcttctgagttgtgcagcatctggagcactagcgtggcgtacgtacgcgatgttgcatggatccggtctctacagatggctggaccgagacgacttgaacgaatcgcaccgccttaaacaattatctgtctccatgcacaagtcccctgtggcatctcaagaggagatgccgacaaagctatccttgtcgtgcaacaccatgcatcttggtgtggtattttgtgctgttgaatgcaaaaacgatagtgtattgaatgcagcttcgcgtgcgtccgttgtggttcctgcgtccgttgtggattcaagtctgaaactactccacaattgggcagtgctattcacgtagcatgcatggctatctatcaactatgaatgaagaccacagtagcgcattcagagctgaggcggtttattctcctaaaacgtcgccacaaccgacccaaagcgtctttggttcttcaacggacgagctagagccatgcagggcttgcaggagcacctgctggtgcctgtcaacaagcccgacgaccaacatgatcaggtggttgtccacgcccccaatgagcctctgcggatgatccccttcgcgttctcgtacctgcacttggtgctctacttggtgctcggtgtggcgtcaggcggcatgctcttcatcctttcggtctggtacccgcacgtgttcacgttcctggctcgaacccagctgcctctctcatccgctgaggacgccgactgcgtgctggtgctcgtgtacggcaaggggctccacgctcaatggctcgagtgttccgtacaccgatcgaccgacaattccaccaagaccccgtggatctggttcgagttcaagaagcatcgctacgtcttcagcctcgaacacggcgagttccgacgatacttggcgacaatccgcgaggaccttgggtctatgaccgcgcgtctcgacactgggctctctaccctggaagtgagctcgagagtcgagcgctttggggccaacaaggtgctgatcgagaagccgcggatccccgtgctgctgttccgcaagctcgtggctccgttctacatcttccaggtcatcagcgccgtcatttggttcattgaagagtacacggtctacgcgatcatcatcatctgcctgtccgcgctctccatcacgaacgagatctacgtcgaagtgtccaacagcaaccgactgcggagtctcgtgcgtagcgaccacaggatccccgtagtgcgtagtggagtgagagctgaggttcatgagtccgaactcgtccctggcgacattgtcgaggtgaacgaaggtcccgtatgcgcagacatcctcctcctctcaggcttgtgcgtggctgacgaggcttctctcactggtgaagcgctgcctgtaaacaaggaaccagccgtaggaacgggtctagtcacggaagctttggctcgagcgcagttcaaggcctcgtgtctccacgctgggtcaattatcactcgagtacgagaaggaagtgataagtgtcggggtgtagttctgagtacgggcttctccaccggtcgaggcgagttgttccgcagcattctcttccccaagccgatctccttcgagtttgagcgggacagctaccgctatctcgtggttctgtggtccattgccattgctgcgttcatcaagcgcgtggttgatggagcgggcaccaacacgccgttcttcgacacgatgctgcactcgctggacctcatcacgatcgccgtgccccccgcgctgccgctcgttctctcctctggtatcgggttcgccatgcaaaggctgcagaagcgcggcgttttctgcatcgattcgcgtcgagtgaactcgtgtggccaagtgacgtgctactgcttcgacaagacggggacgctgactcaagagcatttgagttttgttggtgttgacgaccccgaagccgctgggatacccacactttctattcctccccaagttaaactcgtgatggctacgtgccacagcttgtccacacacgaaggcgagttgcaaggttatccgttagagctcgccatgttcaacgcgtcacactacagcatggaatatctcagcgacaaaggcaagggcggatttctcgtcatggtgacgtccaccgaggatgagtcgaagaagtacggcgtcctgaagcggttcgctttcgacgctgcacaccagcgctccagcactatcatcgaagacgtggacaccaagaagcgctatgtggtcgtgaaggggtcactggaagcagtgagcgccatttcagtcgctacgccttcagatctacagcaaaaagtgcattcatattcagccgacggctactactgcatcggattcggcatgaaggagctaccttcaagtagctctactattgacagcatcaaccaggaagaggtggagtgtaacgttgaattcgagggagtggcgatcttcaagaacgagctgaaacccgagacgaaaggcatgttggatgaactagggggggcgaagattgacgtccgtattatcacaggcgacaacgcgctcactgccgtccacgtttgtcgagagttggagatggctttgaagcccaagatcgcggtggtggatgtggacgcgacggtggggggtacagtcttcatgtcagcggatgcgatcaagacgtcgacatctgcacaatgggagggcttcaacaccagcaacatcgacgcagtcatggcggagtacgacctcgccatcaccggtgcagcactggaaaagatccggaacgactgcggcgacgacaccatccagcggatcatcaagcagacgcccatttttgctcgagtgcggcctcaacagaagacgtggatcgttgaacagctcattgaaatgggtctgatagtcgggatgtgcggcgacggcaccaacgactgtggcgcgttgaaggctgcgcatgtggggcttgcgttgtcgagtgcggaggcgtcgattgtcgcgccgttcaccagcaaggccaaggcgattctggacgttcctgtgctcctgcgcgaaggtcgatgcgcgctaaccacgtcgttccagagcttcaagttcatgtgtctctacccgatcatccagctgagtatggtcattgtgctagcgcacgtgggctctgaagcggataccgaagtgctgctgaccaacaaccagtacgtctgggacgacatggccatcgtgctcggtctgtccatagcgatgctgtacaccggacccacgtacacactctcgcctgagaagccgcccaacacgctcttctcgttgagcatcgtggcgtcgatagtgggtcaagttgccatcttcatcgcaggctttgccgctgcgttagcggtgctgcaccacgaggacagttggttctgctccgttaaggacgccttggcctacgtgaatgctccaagcaacgccactgtctcttcgagttgtgaagtgtttaagggctacgacatggaggcgctcgagtactcgtacgaggacacgacgacgtggctgttcgtgcacttgtcctacatcgtggtggcgatcgcctttaacatcatgaaagaccccttccgactgccgttctacaccaacaaaatcttcaccacgctcgtgatactgacactgggcgtgaacctttggttcctgctggacacgtcgggggtgatcaacgatacgttccaggtcatgccgatcgccgcctccttccgctggaaactactgctactgttcatcgccgagctgatcctcgccagtggatgggaattcgtggcaacctgcacttttccaaagtggctacaaggctgaggctcgttcttattttcccagtcccacgtcccggcccgggagaatgacgtcccgggactcccgggacgtcattctgtatttctataggctgatgggttagtgcataggagtggacaccgtcccaaaaccggacaaaatagtaagaacacacttccattccagtgaaaacacacaaagggtgggcgacatcataacctcaacacccgccaaatcaaggacaaaaacaaggaccaaaagttagaagcttacactggcgttgtttttgaaagataagtcatcttattggtacggagaaaaagcttttgattccctcttttaatcttttgttatgcgttgtgtccaccattgtccattacggcaaaagctacagttgaaaggtgttattaataacatattacatttcatttttgtcctggattctaggacaaattcctttaaatgacttgagttcagtatagggcttcagccgttacaccactcgaacagttgttgtctttgttatacatgacaccctcgtacttacctggatcttatttccttacatacaacccccaagtcacttttggtcctttttgctggttttaggacaaaccctgctaaatacggcgtacttaagtgagttttggtcctagatggacaaaaagtgttggggatgcgatagcgcccagccaacggaggcgaggagcgtagccgcagcaaacccgcgcggggagcccgcgaaccagggccgcgcggtatatgcggaggtgggcccagtgacgagcattccagcgagccgagcactgcactcgccaggtggttttgggacagaaccgtcaaatcacacgtacatgcagtgaaaacacacaacaaatcctacaaatctttttgacttggctttactatagtgactgggagggatgacgcgttttttaaacggaccagccgcgctgcgcttggctgggcgccccttcggcgcccccgctaccgtattcgcttcgctcgcgatatatagattctctcatcccgctccaagtttttttcgcgccgccgggagctgggacggttggtgtgcacagcgcgctctagcgagcatggcgacgaagatggaggagctcgaccgcattgagcgggcaatggaagagtacatggggtggggcgccaaagcgctacggagcgagtgtaggcgactgaaagctacgcccacggcccaaaataaggccagctacttccgtgccagcctcaggcacgtgggccgctgtgcttctcactgcgctcattcaacgtattcgtatgcaccaacgcccatacacttaccaattccgtctccttgtctgtcattttaacgctttagctgcagcgccattgtgccttcaatcgttattttgtgaatggagtacttggcggcaaagcactagcggtggcgccaaattcactggcgctcacatgccttgaaattattaataataattggaggttacataatattttagaggttgtgtggctgacataaatatcctaagttttggttcttatgttgggactttgggacgaaatccccgggactcgtcccgggaacattagaacgggcctaagtgctggaaacctagcttaggggtttaattaactacaactggttgaacactctaccgggtagagtaatgatatggggacccccccctgcttcttgaagtttgtatagggaatgaaagctcactattgatgtgcagatcattcggcgattgtcgtgattcatgacgccgtcgtcgcattatctccagggcgtctcaaaggcgctccctgggcgtatccaggcgctaccgcaagtatgcgacgccgtgaatctgttcgccatgccgtcttctctcgacgacgtcgctggcagtgggcgactggagctggttcgcgagtatttcgatgttattccgagtactttccaggcaatcgccatggcagcagctgaaggccacctgcacgtcgtccagtggatttattcacaactaagtgatgatgagctcaagaagtcgacgtggggtgtgcaggcattcaagggggcggcttgcagcggacagttgggggtcctcgaatggctgaaatctgagttcgagccaaatgctgaggatgtcgaaggcattgcagctctggctgctgctactggacgactggctgctgtgcagtgggtgatggatgcgttctctggtgtgggggacgagcgagcgcttacggctgctgtaatcgctgaccagcgggaggtggaggcgtatttaacgagtatttgcgacaacgacactcgcttgaacgcgttcggctcagtgttggagacaaaagccgtcgataatgactctgaccgagtggaagagttagctgcgaagtgcaaacagtctgacgttcgagatgcgctgacggaggcgatagattgcgacgcctacgacgttgtggagttactctggggcgtcggccaaggtgcgtcgatgagcgtcgacgacatcgggagcttggcgctggagagaacagtgcatgacgatcgactggacatcgcggcgctctatgtcgaggcggaggacatggcggatagtgctggggcggcacttcgcgaggcaacggcggcaaatcgactcgatttcgttgagcttctttacacgaagtgcgaggcgtacgacgttgagcccacgctggatacggcggctgcgtacggcttctgggatatcgtcaaacttgtgtacgatcggtgcagtcctcgttgcgtcagtagggcgttgcggacggcggcttcatgctgccgatgggacgtggtggaagttctgtgtgagaggtgcgaggaaggctgcagcgacgttggagatgctttgaaatacgcggcagcaggcgacgagcttgaaatggtgaagcttctctaccaaaagagtccgcgggatgacgttgacctcgtgctgggctttgccgtggagaatgagctttgggacatggtgaggctcgtgcacggagcttgcagtactgactgtgttgacggcgcgttgaagaaggcggctgagcagtctcgatgggatttggtcgaagtattgtatgtcaacgccggagagtttgctgttggggacgcgctagtgaaagccgctgagaccgatcagtggggtctagtgaagctcatgcacggaaagtgtcgacctcatgatattgatcttgtcctaaagaaagcagcttcgagtggacagcgggacgtcgttgagcttttgtatgcaagtggcgacatttttgccgttggaggtgcgccagcagctgaaggctcgagctaaggtggacgtgcgatgttctggagggccagctagaggtggtcaaggttttgtgggataactgtggcgaactttacgtcatttcaccccaagatatctttaaggcacttgaaaatgctgtccctcaaggccggctgggcatggtatgccttctatcgcgtgagatgaggagcatggtgcaagtagctgtggctggcctcgacgtcatggcgcttctgcgagcggcaagccatcaacggaatctgtgctcagcaagtgacgagctgcgtggctgaatgtaagtactattcgcctcgagtcccaatcgctgctcttgaacacagtttttaattgggcggagacgcgtcgacagcagggcctccgaaaatagcattgtcaataacattatttcagaaaataacaataaattacgcatttcggcgggttcagccatctaccgtgataatttattgatgtgctttgtgatattacataatttatgacagttacctttatataataatgttagcgttttaccagccatcttctcgcttccagtcgttcagaagaactggaatcactggttgtctgtgttgctagttgtagctcatttggcagcgctcactcttcaattttcacttctcaagcctccaagacctcatccagcatggttcgcgctatccgcccccctcgccctacctacacgaactcccaagtctcggggttttacttccgcccgtgtcgcgacgagaacgacgaggtgattctcgagtatttccgttgccgttgcggcacggttcggaagcaaacccataggaacgggtactccaacctgatgcaacatatcaggcgggagcaccctgactacgagaccgtcatgctcgacgctacgacggcggagacaggctccctcgtgaacttcgtccgccactcggcgctcaacctccacggctggatggtttggattgtcatgtgcaacctgccactctctttttgtgagagccgagaagctcggcggtacgtgtatgcataatgtcattgtgtttacatttctacggaaactaacaactttactttatggatgttattcagctactccagcctggaccccatctcggaggaaacgctgcgggctggcatggacggggttgtcgtcgccgtcgagcgttcgattgcgtcggagctcccagcacgcttcggcaccatgctcgacgggtggcacacacatctgagcactacatcgccgtgttcgcgtgctatgaggtgaacggctgtcccaagacaacgctactcagcatggccccgctgctggacgcgctggacgacgatctctccgtgcagggccatctcgatttctagcgaccatgctgcagcgcgattacggcgtacagctggcgcagtgtcgcttcctcgtagctgacaactgcgccgtaaaccggcggctggcaactcttatgagtgtgccgcttgttggttgcgcaagccaccgcctgaaccttgctgttcaggcggacatggcgtcgcatgaggaggacctggctgctgtgcaggcgctcatggtaaaattgcgtactctcacccaatctgccaaactacggtaagcgccaatgtgtatgtgtggtgtgtcaatatgtctctaacacaatttgtgtacttttgtattttttttacaaaataggttgaaaacgccacttcggcctgtcattcgccaggacacgcgctggagctctacgttcgagatggtacggcgctacctccagctcctcgagtttcttgacgccgaagacgacggcctcatggacctgctgccgccgccggcgatgaacaagcgactgcgggcattgtaccaggagctgtgcgacatcgagtcggtctcgaaggcccttcgaagccgacgtcgacctgctggacgttcgcgagtggttcgacgagctgatcgctgtcaagccacaatatgggcgctacatggtaagtttataactgttgaatttgtgttcaatattttcactaacaattgtataatggtttttattttgcagggcctcgggccaacattgtgcacaacccagatttgaggctgggtgtgtacgcgttctccgcgggaaggcgcagcggctgacgcgtgctgaaaaggccgctttgcagcccttcgaagctgccagaccggacgacgcggccgcgagtgaagaggaggaggatccagccgcgtcgttcgtggagcgtcttcggaagcgccggcggcttgcacaggaccgtgtcaagtatgagcagctgaagagcatcccacccacgtcgaacgtggtgaaacgcttcttcagcattgctcgggtgacgtttggtcatcaacgacacggcctgctgccacgcacgcttgagacgattttgtttctccgccagaatcggtcgtactgggatgcaacgactgtggacaatttgagctagatgataagctaactggtgtcttgttaatagacttcatgcttttcataatggcattatttattgtggtacgttgggggcaatgccataatgtactgttgtatcggtaggagcgtcaggggataatttattctgcaacgaccaacctactaaataaaaatgccatattcggaggccctggtcgacagtcgtacaagtcgcctccttcatttcagcttgtgcttcgggtcgccgtgtttattgattcggtcctatcaaagacgacctagccgatgggaatggctatggcagtaaccaacgcggtagatggacttaactatacacgactacagacgacaggtgactttcgactactaatggacaaagttttttttttacgaaatttcactttcgatttgacctcctacctcactcactcattcgcgaaattcatggcgccatcgccgtgggcgtgtcaaaggcgctccctcgacacatccaagcgctatctcacgtctacgatgccgtaaatctgctcgccatgccgttgactctatatggcatcgctcgtagtggccggctggggctgattcgtgagtatttcgacgtcattccaagttctcctacggtaatcgccgcggcggcagctgaaggccatctgcacgtggttcaatggatttatagacagttgatcggcggtgagcgatggtggggggcagtggatgcactcagggcggccgctcgcaatggacggttgggggttctggagtggctaagattcgaatacaaaccgagtcttgaggtcatcaatatgattgcatatgaggctggtagaagtagaaaattgccggttgtgcagtggatgctagatgcgttctctggtgtggggggagaggtaacccttggcgctgctctcgtggccggacaggatgaagtggaggagtatttgacgagtatttgggacgaggatactcgcttgaatgcgttcggcacggcattggagataaaatctacgaataacgacgctgctcgggtgaaagagctagtacagcaatgcagacagtctaatgttcggcaggcgctagtgtacgcgatagaaagcgaggctataatgttgtcacattactctggggcagtgatcaagatgtgtcgctgagcctagcggacattgcggacttggataacgtgttagagagaacggttatcgtcgatcggctggacgtagcagccctttacatcgaggcacacaggatgcactcgtcggacggtcttggggtggcacttggcgcggctgttgctctcaatctactcgatttcgttcagcttctttacaccaagtgcgaggtggacgacgttcggtccgcgctggatgaagctgtcgagaatggctactgggacatcgttaaacttgtgtacgagcggtgcagccctcgtcgcatcagttgggcgttgcagcaggcggcttcatgctgccgatgggatgtggtgcacgttctgtatgcgagctgcgaagaaggtagcttcaacatcggaagggcatcgcaacacgctgtagcaagtggcgaaccagaaatggcgaaacttctgcgccagaagtgcaagcagtatgacgttgagttggcgctatatagtgcagtggaaaacgatcgttgggaaatggtgaaggtcttgtacggcgcatgcagaacttactgtgtcaacgccgctatgaggaaggtagcgagtcaatcgcggtgggatctggtcgagttgatgtatgccaacgccgggtagggtgctgttgcgaacgtgctggttagagccgctgagagcgagcagtggaatcttgtgaagcgaatgcgcgagcttcgagcgggcaatgggacgtcgtggagcttttgtgcgcgaataacgactttagggcgttttagtactaagttctagggctcagcgttttgctaatttagcagtgtatggtagaatatcatcaaatctccgaccgcacttaagatgataggtatacaaatccccagtcaagcgcggtcggagcataacagtattaccctaccccttcccaaagtgttatgcatacacagtccaagatagataagtcgtcccgtttgctcatgggtcggagccttgggatggatggcacggagcgagcgtagcgagcccccgcctgcggtttgacagtccgtgtgcgtagcacgcggctgcaaacccaggacccagcagtgctctacctagtaagcggaggcgacgcgtgcgagccgcagcgggcttagggttctggcccagcgagcgcagcgagcctttaggggttttaggttcgcgcgtagctgggtgatagttaaaggtgaccaccctcctatccgcatgttttgtgtacgagtcggagaaagtcggagggtcggaggtttttgggtatggaactcttccaaaactacaaacacgctgtcacaaatcgcaatttatgttccaaaactaacccaaatgctgtcacaaatcgcaatttatgtgccaaacatgtcctcggttgcgtcgtgtttgctacaaccggtgataccgaccaaaaccatcacatttgagtactaaatccatggctacgctcacttatcgtcagtaacaaacaatgcgtaaggtgcacgtacaatcaacttgggtggtagtaaacactctgtctcttctgctggctctgctgtccacggcttgggcgcgctgacgcagagcttgagatcgcgggcgtgaacgctcagcatgagtggtgattgggaattgaaccaaaataatagtacgcttcctttgcgcttgacgcaatttgtgaagacgtcaaattcatctccacaaattacgatggatttgcaacaagaaatacgccatgtttatgaccatagcaaatatcgagtttgtgtgggttttggtggagctccatgtcaacacatcggattgattagtctcctttcgatggaagctgcttgacgcagatagactcaactggacgcgacaaggccaaagtttgttagaaaattcctctttcgttttgacactcattcgcgagattcaagcccgatacggagcgcacgttcgtggcgaccgacaacttcgacactgacggcacgcccgcgcccctctagaggccttgtgtggacggcatgaccgcggtctctcagaagccggacatgtacaacgcgctttcgggcctcgaccagccccacatgggcagcctgtcgtagttctcagtgagcctcgtagatcggcgaacgaccggagtccatgctagctttatcgattaacggagcaatatatcaaaccgtttgcttgacatactgaaacctagtcaaaaaatctcaatattgacttatcaaagtcaataacgacataaacgttctatactaaaatctagataaacatggcaatgtcgacatctctgaatcaaccatgacacctctatacaaagaactatacaaaaatttcagtgttgacgagcccgcgaagccacgttgtcgtggttggccatacaaaatccaatacgcatagccacgtggccacaatcaccattgcttcgtgatatcacactgaaatccacagatgcacgctcattcggcagagtagccatatcatcggagcaccattgatgttcttgtcgtcacgtaggtctagagagaccgagtagtaaactagtccaagattttgatagcgtgttaccttcggttcgtcatgttttgaaatccacttcagcatgaaagcggcgctctctagttcgtctacccgcctccaacgcatccatctacttacgttggagctacgaatttggaaggcgtcaaagttgcatttggcgtggagctacccaagcgagcaagatatcgtgctggcaaacattaagagttacagtagcctgccatcgagcagcggaagcatgaatcaacgcgctgtgcaggaatgacagaggtgaatcgatgtacaccatatttcaagccgcatcacggactcagtggcttcctcacgtgcagtacgtcttcttcgtaatcgaacggtcttgtacggccacggcttcacccgcaggatacaataacactctagatactgaacggattgcttattgactaggattctgggcattatctctctcacgctgacagattatcatggcaggcttgctgcctcagcgtccgcatgctcgcgagggactgtccccgccgctgccacacagggtcatcccgagcagattaaaatacgatgataccaaatgtgagtctatcaagtactctgctcacgcatcacaacattctggtttggattctctacagatggagatatctcgaattttagggaaaaataggccaacgttttttccagttgagtcttgaaccagctcagtattacgcacatagccgacattggattagataactttgaccaatgagattgaaacctaatggaacacaaagggtcgctggggacctcgcttaccctaccccacaagtatacaaatttctatattaatcttatccctgcaaaatcgggataagagcggtcgccggtgggttaaccttgctcaatcaaactcagttgacattttaccagcaaaacaagtggccttaaccacacgtgacagatagcggcaactgagggtatgagctacttaggacatgtcctggttcgagctgctgccgagaagcagctagacgtggtcaagattttgtcggataaatgtgacccgcatttcctgggagatgcactgagcaaagctacttcagacgtcgaaggctttttggtggagacttgtggtgcctcttacgttcggaaagcacggaagcttgctcgtctcaaggagtttgtggaggacgaagtggcgcggttgattgccagcggcctcccagctttgtgtgcgagggtatgggggattcgcgcctaatgatggcggtggaaagagcgctagggcgtggtctgtggagcttgaccgatttcatgaagggctattgcaagccgccagatctcgcgatggcaattgagaatgcagtagctcaaggccggctaggcatggcaagcattctatcgcttgatatgagaagcatggtgcaaatagctgtggctcacggtggcctcgacattgcgaagctgctgagggcggcaagccgtcaaccgaatctgtgctcagcaaatgaatacgatttaagaagctataacctacctacgtaaagtcccaaattgctacattcaataacgtggcgtctacagtcagttcattgcagtttgagctttaggtatagccgaggataccggtgattcgttcttccagtcaacgatacaaccgtgtgtaaaacaattttactaaaaaaaatgacgaatgaaatgaacccctgtcgcggcactggaactcctgagtgccccccccccccaccgggtggggggggggggggggggcagtgcaagaaattgttcaagctttcgatttgcggtttggagctcattcgctgattcacgacgcgacccagactatggcgtcgccgcactacctgcagggcgtctcaaaggcgctctctgagcgcgtccaggcgttgccgcacgagtgcaatgccgtgaatctgttcgccatgccgtcgactctcgaccccatcgctcgcagcgggcaactgcagctgtttcgcgagtatttcgatgttattccgcgtacttcgaaagcaatcgccggcgcggcagctgagggccacctgcatgttgttcagtggatttatactcagttaagtggtgacaagatgaagcagtcggcgtgggcagtggaggcatttaaaggagcagctcgcggcggacagttggcggttcttgagtggctaaaatccgagttcgagccgagtttcgaggacaccgaagacgcagcagttgaggctgctactcatggacaattggttgttgtgcagtggctgatggaagagtacgacggtgcaggggatgcgggagcccttactgctgctgttatggctgaccagcgcgacgtggaggagtacttgataagcatctgcgacgacgagacttgtttggacgccttgggcgcagcgttgatagccaaggctgtggaaaatgacacggaccgactggaagaattatccgagagatgtagcgagttggacgttcaagaggcactggaggacgccatcgaatgtgacgcctacgaagtcgtggaagtactttggcgtagttatcatcaaggtggacaggtggacgggtatgcgatcgggctttctgtgcttagtgacgcattaacgagaacggtcatcaacgatcgagtggatgttgctgcgatttccatcgaggcagactgcatgaacttgtccttcggtgttggggacgcactgaaagtggctgctgcgaccaatcgactcgactttgttcgacttcttctcaccaagtgcatgccgcacgacgttgggtccgtgctggttgcagcggttgatcatgggcactgtgacatcgtgcatatcgtgtacgagaggtgcgaccaatacgccgttggatctgctttggagaaggcggcttcgagttaccgatgggatatcgtcgagactctgtacgaggggtgcgaagaaggatgccgccatgtcagagacgcattggaacacgctgttgctagcggcgagcttgaaatggcgaagcttctgcaccggaagtgcacgcagtatgatattgagaacgcgctgtatgctgcgatgggccacaaccgctggtgtggagctcttaccatcggacgcgctctggagaaggcagcgagccaagctcgatgggaattggtcgagttaatgtatgacaatggtgcggggctgggcggttatgctgttggagatgtcctcgctgaggctgcttcaattggccgctgggatgtcgtacagtatcttcaggacaaagcaaaaggctacggtgtcagtcgcgcgctcagcaaagctgttgctggtgaggaacttagcaccgtggagcttctgtgcgttaaatgcaatctccttgacgtagcggtcactatggatgaagctgcgatggatagtcggtggtgcgtggttcaagtgttggccaaattgtacgtggaaaagatagcggcgacgacgggcaaggtctacttaatagaacgagtcctggagcgtgctgcagcggagggtcagctaggcattgtcaaacttttgtacgacaagtgtgatgactcctcttgctacgtcggcgttcgagctactccagaggttagagagtttctggctgcgaattgtggtggcttgtgcgccagggaatcacaaccggtcgaagctccattttacgtggatgacttatcttcttaccagtcaaaagttgcattttcctgaggtgaaaaggctggcttcattgccttcgcaaatgcctgcttccgtgcaccgcagtccgacgcctcgtagatgtccactgcggtttgcagttgctccctgtacaacacacaacgcgttatgaatgcaaccgtggctcacttccctcaccaacacaaacgttccacgaaccgaagcgccttcactcgctcctcacttggcgggtgcgtcgagaagtacttgaactgcgagcctttgtccagctggcccagcaacgtgttcatctgaatgctggcgcgagggtcgtagcacgcctgcgccataagtcgcagcccaatcgagtcggcctccagctccaacttgcgcgaaaacggcaggtccacagccagcttcaccatctacaagcagcaaccacaatcacaataggttatcagtataaccgccaccttctcaaagcttagttatccataccagatcgctaatctggccgtagtccgggaacagcagcgccagaagtccatacaccagcaagctgaaggagattttctcggcgccatgacctacaataaatagcaacaaaacatcgttaaacagaccgtccgtggctagtcttcactatctagtatagcaacttacgggccacgccgtgtgcagcttcgtggaacatgacggcggccagcgcgtcctcgtcgcgcagcaccttgaagagccccgagtgcacaaacaccttgcccccaggcaggcagaaggcgttgggctccttggcctcgatcacatggaacgtccacttcatgaagggcgcgtccgactcgctcgcgatcttgtggccgacgcgcgccaccgcccgcgacatctgcaacagcgacagagcaacttcaagtgagccacttcatctccatctcaataatagtcgggagccttaaactctcgcaccgggtgcgacggcggcagcaggcgggagctgctcagtatctctcggtacgcctgctcgcccagccgctcctcgtgctccggcgacaggaacatgacgcggcggcggccgttgagcggcatcgtctccacatggctctccacgtacactacagttccagcatagtcattgttagagcgcagctccagccctatacaatattgcagtcaacacgcacatcctcccagcgcggccgagcccaccaccaccgccttcaaatagggcggcatgcgcctccagtcctctcgccagcggcgacctcttcctccgctgcgcatccgatgcatactcgttgcaaagtgaagtggtcggcagttgatacgcatgtttcattggtcgaaaacacggcttatcttccacccaatcaaaacgattctaggtttatccatcaatcagcgaacacacttcaccaagagatccgtccgtccgtcagtatgtggcagcgtctccacctcgcgcggcggcccgcggcggctctgctgggcgcgcggccactggcccagcgtcgctcggccgtgcaccccccgctgacgcgcctgctgacgtcggccgcgtccggcccggccgactgcagccgccgcatcctgtgcgtagacgtgcccgagcacgtggccgaggcctcgtgcgtgcaggagctcgtgcagcgcggccacgttgtggaccaagtgcgcgcagcctcagacgagtacctgacgtctgtggtgaaggactacgacgcgctcatggtcgcgcccggcaccaagctgccgcgcgagctgctgcgcgtgggcgccaagaacaagctgcagctcgtggccgtgcccgcggccgccatcccgagcgaggacattgacctcatggaggccaccaaccagggagtgatgctgctgcagctcgagcccaagcaggtgggcgaccgctcgtccgtggaggccgagatcggcctcagtctgctcatccagttggcccgtcacctgccgcgcagcgtggcctccatgcgctccggcgagccattcgaccgccagcagttcgtcggcacggagctcgcgggcaagaatttaggcattgtgggcatcggccaggcgggccgccgcgttgtggatatggcccacgcgctgggcctcaaggtcttcggcttcgaccccaacctgaaccaggaggcggccgagctcatgggcgtcaagagcgtcaccatggacgagctgtacgagaactgcgacttcatcacgttccacgcgccgttgacggcccgcacgcgcggcatgttcggagacgcggccctggagaaatgcaagcccggagtcaagatcgtgtcggtcgccgagtacaagggaagccacggcctgctggacgagaacacgctgatgcgcggcctcgagtcgggcaagatcagcggcgtcgcgctggacttgctgcagtccgcgggctccaaggacggacgggacttgtcgcccaagtggctcgagctcatgaagcacgagaatgtcatcgcgcgcacccacgcggacggcgcggcgtccgacgacgtgctgcagggccgtaagtaccgccttctggccgaaaacgtcggtgacgctctggctcagcgctactaccgtggcgtcgccaacggcgtgttcatgccgctgacgctgctgccggagatgaagccgttcctggagctgagcgagtcgctcggccgcttcgtgcaccagctgacgctgtcggcggaccccaaggaccacatcacgaacatctcgttggctgctactggtggcttccagattgacatcaccacgccgcaagcccgccaggtgcttcagaacgcgctgctcaagggaatgctcgagagcatgcgcgagcacaagcaaaatgctgaggacgaggaccagcctgatgtcagccttctgaatgcctcgctgctcgctatggccaagggaatcgatgtgcgtcagggagacttgcagaccgacccggccgctgtccgccgccacctcaagaactgtttggccgtggtggtggaggccaagaacaaggaccgcctccttgtgaagggcagcgtctttggcgaggacccgcgtgtcgtgcgcgtgaacgagtactcggacttcccggctttccgccccaagggcaacctgctggtgttcaacaacgaggacgtgcccggtgctatcgccggtatcctcagcgagctgtcggaggcgaagatcaacatcgccaactttggccttgcccgtcagaacaacgtggagcttccgcttggcattctcactctggactcggtgccttccgacgaaacactcaacgcgctcaaggaactgcccagcgttcgcagcgtgcgttttgcgcaggtgtaaactcgctagcatttgtgctgtgagagatggcaatggctggtgatgctggagtatagaccaacatagtcggaaggctcggaaaaagacaacaaacagtagcgacgcagcagctatcgtctgctctcttttatcaattcaacagagagccacgaagctccagcaccaccagcgagtgcagtttcttgcgctcaaggcgcagcacaaaagaaaagaatacaaacatgaaccagtgccgtacagcgtcagagaatatagcagccacatcaatcctctcacggggattaggagatcacgaggggctgcaccatcgactgcgatcgtcgtctctccttcttctcaagagaagctgcgtacaactgcttcttgtctgtcgaggtctgcaggaagcgcttcatggtgctgtacaggaaggggctcatggactccttctcatgctgcgtcattagatatcgggtgttagtcgtgcacttagtactcggctcatccagccaacaacgagacggaaacaacttacctcatagcagtacatcattacagacatcgaggccgagaagagagcaatctcaccgtacttgaagccggaacagatcccgcggtcgtgcaggatcatcgccaagctgtcgagtgcgcgtggcaacacgtacagcgccaactctgaacacacaaaatccctatcaatcccacatccgaaagagccaattcaaacctcaagcactcgtaccagagcgtcgacttttgggttccaggagaatggtcgtcgaggctccaagtccggccagataatagatgaagcgatggtctttactgaccacgcggcggtgcaagcagatgagggacaaatacagcgacacgaaggacgcgaggaagcagttggacctcgtagcattcagtatcgagcgcgcaagcgttcggaatggcgagcgcaggaagcgcttgaagtggatgaccacgcccggcacgatgaagagcgacaggtagagcgggaaggtcttctggaaggcgcgcttgaagcacagcaccgaccccaccacgcacgagtcggcgtttgaatgcacaagcctgcaaggcacaatgtccgtgggcagcgggaaatccctcgggattcctggcttccggtccagcagcttctgaaggacagcagcgctcgctggacctccgcgattgacctgctgcacaagcttcaacgtctccagctccactgggccagtctgcacaatgaacctgtagtactccggaggtagcgtcgttggtctcatgacgtacgcgtacatgacctgcgcgctcgagagcgcaaacagcagcgcgtctccgaatcgccagtcgcttccccagaagtgccagcggcccagcctcttggccgtgttgtatccgcactgcagcgctctcgtgagggcataaagcgctagtgaccgacgtcttttagcgtccacaaagcccagtgcaatggccgcgatagctcctgagcctagcgccgagatctccttgagcttcttgtcgtcctgcagctgcttctttggtagaacgcgccgtagaatgaccggtagtagcgctctaagccccctataaccccctgtgaaccagcccaggaagaggccgagcctcacggcgtccacgcggaaggccaagtgcttctcgtccagcagctggcgcagatccgtcgccgccctccagtcgcggcgctgcagcagcttgagcagccgcaataacgccgcgatacccgcgcgcgtgttgtaggccagcaggaagttgctggtgcccaggcgcagcgcctccagcagctcctgggccagcgtctcgccctcgtcgccggcctgttgctcgctcacgagcgtccgcacagccagctgctcgtcctcaacggccactgcgtcctcttcgccctcgtcgtccgagcggctgaagaggctgatgtccgacgccgtcacgtgcatgttggaggccgtggacggcacgcgcggcggcagcgtggacgggaaggacggcgccatgttcacccgagcctccgatggacgatcgcaatgaggatttgagctgtttactgaacagttgtttggtccgactaaaaaagctgagccatttcgtcatgtttgtgtcggcgtgacgccacttcacttcaacttggccatatctgtctgcaggtatctgatgttggttggtttggttcacccaggagttgaattacaattacctactgctacgagcaagcacaaagcctacactaccaaagacgccggcggacggaggggatggttgacccgaaatgctggagagtgagtgcacctagccatgccttccgctccgagacgcgcgcgacgccgcttgatctctaccatctacaaggtctcgacgaaggtcatgaggtccgcgctgtcgccgcccgaagcgccaccggagcctgatgtgccctgggcgccggtgccgtcgtcccaatcgagcagatccatgcctccgaagctggtgggcgacagcgcgctggagaagtccatgagccccgacgaggtcccggagggcgtcggcatctgcagcaagtcggtgcccatgctgccgtagagcgagtcgtccagagtcaagcccagaccggagccgattgacgggctctctcctcgtgacgtcggaggctgttgagactgttgtggctgaggctgtggctgaggctgctggggcttctgaggctgtggcggtggccgctgctgctgtgcgggattctgctggccttgctgcggtcgcgagggtatctgctgccccatttgctgctgcgtctgctggccgctctgctggttcgccgcgttctgactattctgttgctgctgattcatttgacttgcctgctgcgccgaaaactgttgctgctgttgctggggcttctgctgcatctgctgttggcgcatcatttgttgctgctgcatcatttgctgctgccgctgcatttgctgctgttgttgttgctgctgctgcatttgctgagcccgctgctgcatcatatactgctgctgtttctgttgcggggtctgctgcatcgacgccgacgtatttactgcgccttgctgctggttctggccggccacttgcggctgcgtcatagcagcgctaaagccactcgacgttccggtcggcattgtggaggatcccacgctcgacggcggccccgaagacgtcgggccagcagaagtcgacggaggaccgacaccgccactgctcccatcaggagccgggtaactccgcttgtcagtctccgtgcgcagcttcttcaggtacgggttcacgatctttacaatgtacttgaagaccttgtcgagctcctcgatcttgcgcgccgggtgcgtggccttgtcctcgctcaagatgttggcgcagagctccacgtaactgagcaggtaccgcagcttcttcttctgctccgtctcgtcgtggccctccatgtgatccacgtacttcttgaaggcgctgtgcaccttctccacgtcgccctggtgcttggcccgcagcgccgcgtgctgctgccagtactcggccgccgagttggtagatgcactcgcctcagtcttcactggcgtcgacacggccgacgtgggtctactctgttgctgctgctgctgttgctgctgttgctgctgttgttgctgagctcctgggtgcggcccgggtccgctgaactggccgtggccggggtagctgctcacctgtccgctggcgccgcgctggcccaggttgagcgtgttgtagtaggagaagtccagcctcgagagcatgccctggttgggcagcgcctgcgccgccatggccgcgttcatgtccgactgctgcgcgcgcagcgacttgaggcgcgtgaagatcttgttgatgtagacctcctgcgtgggcgactccttgtagagcgacagctcgtaccacgacacgttcatccagagcttgatgccgggcacggggtccgccgacacgcgcaccatctcgttgtagatcttggcgatgaggttggcgcggtgctcgcgcgtgagctggatgcgccagtcggcgccctgctgctgcgtcggctgagactgcgccatctggttcatggccatcgagttcatgggcatctgctgctgcgtcggctgaggctgggccatgggctgcatgttcatcatcatctgctgctgcgggtacatgccgttcatgcccatggccatggcggcctgcgggttctgctgcatggccatggagttcatgggcatcgacatgccgccgccctgctgcatgcccatcgcgtgcgggtccatcgcttcggctcccctgcctgccacgcgccgctgagctgagctgagctgagagaggacctgcgtgccgagtcgctctttcgcgaatgtgagtcggagggaagtgagcgccgcgctgcacttggtttcactatggtctgacttgcagcactggacacttgaagagaacgttcggcgatgtttgttcgcgcgctgcgattggaggaaaagacaagatattttcgtccaatcgacagatggctaacagttgaagtggctgtgagtcaaaagatacgccctgaattaacaggcaaagttaggctatttcagcagcaaaactgcaacatgcaacatgtaaaacgtaagccatccacctcctccctctcagaagcgcgtggacgccaggtcgggccgcgcgcggttgcacacctcgcagtagaagttggccatcgagttgaagaacgtgcagccgccctgctcgccggcgcagacccacttgccgcggggcacgccgcgctggccgtccatgtcgagctcgcagatggcgcagcacacgtcgtcgggctggttgatgaaggtgcagttgccgcagcgccatccctgttgctgctgctgactttgcagtgtctcgtcctgttgcttcgggttcggctcgttgcaggctccgcacgcgtctgcagtgccgtcgttcacgtacgtgcacacggcgcaagcccaagacgcctcagctcctagccccgcagctgcccgcgcactctcttggtcgtcacgcagaagcgcgctcttcatctcgtcgcgggagatgccgaaggccgcgcagatcgtctccatcggaatgccctgctcgtggcccttctcgccgtccgtgaagcgcgcgtccgcgatgaggccgatgatctcgttcagctccttggacgagaagccgagctggaagctctcgaagcacttgtggacctcttcggcgctcagtcgactgtcttcgtcttcgtcaaagcgccgcagcgccaccgccaggtggagcgcagccatcgtcggcttggggtccttgcccttctccttcttcttctggtactgtcgctgcttccgcaacagactctgctggaattgctggagacgcgctcgcgcggtgagcaggtgccactcgctctgcgcggtgaacaccttggccagcggcgtgtcgccccacagatgacgctcacggcgtcgcaggcgaagcagacactcgaagaactcgtggcgcagtgagatggggacagtggccagaccctccagcagcagctcaagctcctgcgggaagtagtacatttcgttgttgaaaaagcgcagacactgcacgctaacggcgatcgtccgctcacgcggcgccatctcactcagcgtagtcacggtagattttggcgcccatgccgagaagaaagatgagctctcgacgagttcaccctcgctggtacgcaactgcacttggctgacctggaacacagggtgcttcttgtggatcatgcgacggatcgtctcgccttcagcaagcgacagcgttgccagatacacgggaatcttgctcgtcgtgactgccacggcatctttcactgcagtagagaccgcatcgggactcgtcgtagtcatctcagctgctgcctgaagggccttcaccgcgatttcgtttgcactgccaccaccttcagcagtcatgatggccatgaagagctgctggacaaccgtcttcatggcttcttggtggagtagtggagaccactcgagaattagcccaacgttcttaacgcgccgctcgccaagacccacccaacggcgtctgaaaaagtttccagacataagcaactccgatgggaacgcaatcttcggacactctgcatgagcttggaactgtgagaacgggtagaacacgtttgcctcttcttcctgctgcagttccacagcagtcttcatctcttcgtcgccatcggatgtagcagctccagcaggtggctgggctagaacggtcgcactccacggaatcggatgctcgtcatcacgcgtgaaagcactcatcttctgctcctcttgctccgcctcctcttcagcttcttcctcagcttcagcctcgttctcgtgaacaacctcagccgtgaggcgcagatcgccttgctctgaaccgtcctccgctagcatttgttgctgacttcccgatgagtgcgccaatcgttgctttacagcagtcacgcgcgtagtttcttcgttcgtcttcaggaagtcttcgtggctttcaactaacttcccgataacatcggacagttgcttctttgttggtacgactgcgtccacgttgtaggagatctccacacggaatattgagatgcatttgcgtagccaagccttggcgctgtcatcctcacggccaataaatcggcgcagccttgatgacaacgaggcttccttcgctgtagctgcagcaatttcgtttagtaacgagtgaagtgcacgcctgcgccaggtattgtgcagttcttgcaacgatagctggacaagctgcattgactccattcgcatcgagttaatgagaagccacgctggcaccagcagcagaaactcatccaaacgttgctgcgctgaagcctgtgtgctcaactcgacgtgcgcaagcttcatctcgtggcggatgcggttctcaacttctggaatgaggaagaggcaaattgactggcctgtagcgattccgcgcatgcggtaggccccctgagcgtaatcgcggaatgtcatatccttgccaagcgtgacaacagctcgcgcgttaacgcattgtttgatgtccatgccagtcgtgtgaacttgatcatagaatgtaaacctcttgcttgggctcaggccacactgtaccaacggcatgggggcgttgtggtcacgcagcaggatcatttgtcgatcgtcctcatccaaatacaccactccttccatttcaggtggtagctccgccagcagaaaagcagctacctcttggttgtcaaagccggtgatcagtgcacccgtgtcaatgagcgcgtgcactgggggctgggcatgcgcaatatccaagagtaagctccttgcagtccactcgaccttgcgctcgatcgacacaatgcgtttgttggtcaatgcttcaaaaatgctgccgtcgctgcgcggttcgtaatagcattctcccaggtccatcggtaacaagttcgacggcgttcccgaaaaaccaatgcgcttagcgaacagagagttactgccgagttcgtgaccacacgccgaaatcttaagcttctggaaattcatgcatgacgggaagacgtgttgccggacatagtagtaaaccacaccagcaagcttggctacgaggaagtgcagccgcgctacctgggccgagtcacgaagctggaacagaggcagaggaagaacaccaccagacgcctcctgcttgtccgacgacagcgcagctagaccagtacggacccactccctgaacatggcacaagctggacgctggtcacgtggtcccagctgacgactgaagtcttgctttagttgcgatacgatacgcacgaggtcggaaacacgaataccctcgtagcgataggccaaaatggtcagtccgatcaacacgtcagggtgtgcaaattctgaagatcgacttggcacatcttttccgatgaatggcacggccagcatcagccgagaatgggcgttgccaccactattccctgacgcagcagccgcttggtgttctcctcttaggagtccataggacacacgattgatcttagaaagcacgtgaggaaggattgtccgcaaccaatcgcgcgcaaggttgagcagcttgatagatgattcagacagcccgttctcaatattagcacgtagtgcagcatccgtatgaagctcggtgcgagggcattccaaatagtactttatccgatcaacggatacctctatcttccccatacggaacaacttcatcaaccattcaattgcgatttccgaaagcagcggtagcatgcgtgtctcgtaaaattccatgtccagcagcaccaggtgcgggaagcgctgtagcgtgtgagcagcatatccctcgtccaaaacagcgtgcagccgtggaatcagcccataagggtcggtagacgtgtctggtgatgcaagaacagcgtcaatcaaataaatgggcaattcccagcggttcgcagcaaggtcaatagggaacttgttgccgatcgggaagttgagctctgaacgcagcgggtgcaacaaaacgtccacctcatccatgatcaagatgccactctgccagagtctgagcgtcttgtgtagttcgtctgccatttccgagcggtcctcaagcacgcgcctcaaacgcctgatattttgtgaagctgaagtcagcgggagctcgatgatatcagaagactcgtccagagaatgcaacagctcgacgagtttcaacatcatcgatttaatcgactcaggagacgcgcataccacatcgccgtgacgccgagcgcggtccagctttgtatacatctgcaatgcagccgccggatcgtcacttattgcacggtcaaactcgaacgtgaagatacgcttgcgcaacacgcgattactgaagcggcttcgaagcacctgccgagactgctccagaagtgctgttggcataacatgagtcacgagatgctccttgtcggcgagaatgtacgttagcaaaggccccaccaccgtcgttttaccagctcccatgatcatttgctgaactcgggaatttcccttctccagactcgtcaaaaagctgtcgatcatctgaacttgtcggccacgcaacaagatgtcgaacacatactcaaacaccaagaaccgagggtcaaacttccaccccgttgaaccaccctcagttgggccacgaaggtagtatcgcttcgatagtagcatgtcggccaagtctcgagatgcctgacgcgtcatcttcactctgctactcttgtcatctgcgctttgagaactagcaagcccattcaaatgcttgacaagagcacgcgctgcctgaacagttcgattaatatgaactatccgactgcagaggaagagcacaagcagaattttctccacaagatccgctgtcacgttcaccacaaacgggtttctggtctttagatccgcctcaaagcgatctgatgccagaagagatgtgaggaagtcaaaggacactcgagggtataaaccaacgtgccgctgcatcacaaagcggtcggctgcgacagccttttctgcatctccatgaatgtcaccgcggatctcgtttagcagcatctcaagcatcgcaatccctttttcaaccatcttacgatcacttgttctcatcttttcacacaggagaatcaacatcttgagactttcgacagccgagctgggtgaattatcttcgatgggcgaggataaattcatcggcgtcacgcccgtgatataagcatccttgcttccgtttacagcttgcgcgttgatcgcaatgtcgtctccaagtctcttgagcaaatcttttgctgctgcagtttgtgctaccgggtgcttggagaggtcgaagggtagagctacccccacttccgcttctggatcacagaaggtaatgaaacgtttaacgtcaatcgcttccagcgggaattcaggattaatggggctgctcttggcgcccacaaaaagccggtcaccacaggatgcgtttgaagcatcgaagtttttcgactcgtccgtgggggcgatcgatatcttaaacacatgctcggcagtctggtgcaactggccaaactgcgtcttgattggggcgattacgcgggtctggtggtcctccgactccagcttagattgaaattccatctcaccgaagtcgaaaaagtgttttagcattgtccccacagtcatcttcgaatacaaatttgcaccacgagaaagcatgtgtacactttcttgatcgcacggagatgagggccaccctccacttggatgggcaatcaccatcgccaattgtgccattgcgtacgagggtgcgcattcttcttcgccatcatccacggtttcacgaccccacctcgacaacttcaggtgcaagaagcgagcgaacaagtctccaaaagaccgtgtgcagtcttcgccgcccattcgaacgataagctgctggttgagacactcatacaagaacagaaagcccaggccacggtttgttccgctaatctcgtcaccgacaaccgcgcaattccacaccagctttccagcctcctcgtcgtcaatcaaaaacttgttatcgataccgactccatgcttcggccggttgtaccgcactgtcgagagctttttgccgtgcgccgcaaggtagcctttgctgtacaagcagagcttcatccacggttggccaccaacacgtgatcgagaaagcttaaaatcaatagtgccgtccctgtctgccttcatattatcgcagaactccttgcgcagcaacagaagaggggatcgttgatgacaatgcgcaagggcttccttctcttcttcgagagtcaatttgcaagaagcatcaacgtggccactcgtggtcaggtagtcatgcagttcaccgctcagcttccacggtgccttattgtcgctataggcaatgccaagtgagagtcgaatacgacatgcgcatgcatttgggtggcggtcgtccagcgttttggccagttgatcgaagacgcgcttctcttcgtcggtaaatttcacgtccacattgcaccccaggataagctccatcgctgctgcgtaattccgagtaagcagacttgtaagaatcaggtacagcgtagagctgagagatgatgggagcaggaaggtgttgcttgaatgcacaggatacgtatagaatcgcgtctccattgcctgctgccatcccacggacccacggtcgctaacaagaatcgaggaaaacggttctccacgtattgcagggcggtacacgtcgtgattgggacagataagcttcaggtccgtagtatccgactccaacacaaagcagtctggtgcaatctcgacgaggcctcggaggtatctggaggtatcttcaggcattgcaaccgttaaatcactcacaaaccagtcattctgatccatcacgttcaggcggacacgtcctgacaatgggtcctttgccggctgaagctttaatttcaatcgcggaagctcaaggaaagcaactgaggacagccccctaggcgcgccttcctcgtccttgctggtgcaccaaaccagaatatgcgataggtcttctacccgactgagcaattcggatagcgcaacaacctcgtcacttgccgcagaactggcttcgagcaggctcaacaggtaaagcgtctctccaacagtttcctcaacaagttcaagcgcttcgtcatcatccatttcgtccttggtttcctgatcaacgtccatgggtgtaggagcttcatccgtagacacgcttggctccgtgtcatcacttctcgcaccttcaacccgtttgatttctgcgcgattagcaggatcctccagccatgcttttgccagctccaaatccttaccgaaaagtccgagtgcatactcaacagcaatccgcgacggggaatcctccaagctcatcagcagcccgatattttgttcgtgctgctcttcagggctaagagcaacttcacctgatgcggctgcttcttccgccccaaggatcttcatctgattattttcgtcaagaagccattgtgctgctaaacccacgttgttccggttttcgcgcagcgcgagaccacatccagcgtacgaaaatcccatagccataagttgaaccacatcgtcgtcgctgatttcaatcgaatcgggcgacgggtacgcaggagtgcgtgcggattctgttgcagatcgcccgggaactcgaacaggtgccggtggcggctgcatttggctattcgttgcagaactttctttctgatggatccgagaaaatgaagtcatgatagactttcgactgataaaggcctgtccgttctccttcatttcgatctcaacgcgataacggaaccactgcgactttgagtccacgggttcgcctcgaagacgtccatcttcaccgatccagaagcggaaattctccaataagcagcttggaacaacaccttgcaggaggcgtggggggacaaactgctcagtgccattgagcaaatggtttttgcgcaaaatgactagagacccaccaagcgcttgacgctcagtaggttcgccactagcacgaagcaaagccggatccacagggccttggtccggagagatattcagagggaagctgtgaaggcttagacgcgagttcgacgtgaagataagcttgcgatagagtctacgtccgtgagagacaagtgcatacatatgcatcacttgcatcgttcggtacgccacaatttccttgaaggtcgcaatcttctccttgtctttatcgtcggaacctcggtccagtccgatgatgcgcacatgggtagcattagctggcaacgggtcgcatggtaggaacaacatgtacggcaactttttgtcgtcggggacgggagggtacatgaggcgaagcgcgttgccaaccaaatccacaaaccattgttcctcagcatgagggtgctcctgctccgaataaatatcaaatggtctcgaaaacgtcttgccaagataacgaaatccatcatcaccaggcagcttcggcttttcttccgcccctcttgcttgttgttgttgaggtggagcacgagcaatacgaggtgtaccgcatacgtcgcaagtggcgttggggttatcaccattgaaattggcacacgtgcaggccggacactcccagtacattttaagctcttgaggattttcgtccgggttatccgaaccaccacccgttccaggttcatataccaccggggcgcccacaccttgatctatttcatgcgtagggtcatcccattcgacaagttgataatcagtgccaacaatattcacccataggcgatgttcctgtcgcgcaaccagaccgcaatggagagatttgtttccaaagattgccataaaatctgcatactgggtcatcgagtcctgaacgggtttgagttcgtcatttctccacaatatctcccctgtttgggcatccagcttcaactcttgctggcggcaactgaattttccagcacctccgacgtcggactcctcgatccattcccacgagtcagtttgtttggttgagcgcagagcaattcgcacgatatcacccaggacctcgtttcgacttgtctttggcagagttactagccactgcacgattgaacggcggtgcaactgaattgtctcaaagatctccgcctcgagaacgtcacctggtggaagttgcagctcttttccctcgttgttacgtagagcaacgatactgggggcttgaatcgtctgcattccaaccttcaagtacagaggtcgccccttcaagtacttctcgagagatttcttgccgacgttcgccgtatcaatgccttgcgcctggagccagcgaagcagccgctcttctgcggataacccgcccttctcgtcttcaccgtccgtagatagcttcataccaaagcaatgccaattatgcacataggctatggatcccatcagctcagatattttctgagtgtcgtattccgaagggcgcaggctcacatgaagctgtgcaaggtacgaatggattacacacgctgtctgaaggttgttcgcctcctccgcttcttgtctccacttattcagagtggtgtgcgcgaagccaaacacataggccatcagctgggaccggtatccttcaagcttctcgacacgagctcggtcgtctcctgcaatacaccgatcgagagcaaacgtcatgtaacgaaggacgtccacgcccagctttatcatgaacaggatgaaccgagcgtctgccgaatgcaccgatgcttcgccaagctccttcacagcatccagcatcttcaacaacggaattacaattgcttctggtgcatggatcaactcattcagaagcaacccattcatggtaccaaggtggtcttcacacttctggtgatgaacgcgggcatcaaaagttcgctgaatagcttcctcgtgcatcacaaggttggacttccgcagcggtatatgagagatctcttcggccttttcatccgagacccagtctccaccctcaaacaaaacagcgcggaacaactgctgtagcatcggattgaacaaatacgttacgcggtcccgcgaggagaagaatgacgccacaagtggaatccgcgtgtatgggaccgtcaagtagctcatgaggtattccgactcctccgcagaaagtgttccattgtacgtgggcaggtctgtaaggtgcatgatatcatcttcagtaatcactgtaggcaggcttcctgctgatgcactgctcgagcttttgacaagtaaagctccaaggttcgatggactcgtgataattggcccctcaccaaaatatacctttctctccatgaacccttcgacctccacatcagcgatatcttggtcactccctcgaaagttcaccacctcccacttcaacgtcgcgtgcaaaattcgattgagcccgcgcattccgaaaaagttccgtcggtgagtcgcagatgaatcatcaaacgaaagctgccacatttgccaatgttggtgcgcggtacggcggcgcatgagttcgacttcctttgtctccatagtagccaggaatttcaccaccatgactagatcacgagtcaaccccacttccgggtggtcatctgccatgggcgtggtatcgctgcaaaaccactccataagtgcctccatttcagttggcggagtctgattgtttgggtcaattagctggtagtgataccgctccatcagctggcggaaaaacagaagcgttgtggagtacttcttcacctcaatcttgtcctcaggcatgtgatagtcaaaaagttgtcgcttgccccttgcgtcctggctgtggaaatacgcgagcacttggccccggataacacaaaagtttggccgagcgaactccattgccgacgtcatcttctggattgaaaagttggctttgcagaacgtgtgtgcaagtacgtatccgccttcttcctccatcatcaacgaaatctcaagtggttcgtcagctgccggcgtacgaattaaagcatcgaagatgcacagcacacatagagctgcaagcgcgcgttccgagtcaaactgacggcttggttgttccattgactgccacaccgaccccaaaatcatcagcagtgaatgaagatggttcagacaccggagctgcatgtccttcgcaaccggttgccgccacatgcaagtagacgatgcgactccatcggcactaataggttccggcactggtaaaacctcaaccaggacactcgttataagctggatgacttcgtggtgcagcgagactcgagaagaggacgagccctcagcggctcgcttgagaagagactcgcacagtgcctcacatcgaacaaacgcagctaccgccaatgggatggatgtgacgcgttctggtacgtccaggaaattactgagggtaggaatttcgagctcagaggcgtttcccgcatattcactctcctttccttgaagctgcaataactctgcattcgcgtgaggtgcaaacggaaacgtctcttccagtgtagcagtctcgcgcttactcttgccttcggagctaggagtaacccctacagaatctatcaagcgttccgtttggctcatcagtttgttgacgtgactgagaccaagagcttgaatattcttgcgctcgtggtgctttagcgttttcaaaccaatttgcttgacacccatggcgatgcatttgatctccgagacggttagcgtcgacttgggtaggttgaagtcctcgcctgtccacggataaaactcgccggtcggatctgacagcacaagctccttgcccaacggcgtcaagatagctccatcaggtccacgcaagatgagctgcggcaccttccttactccgaacgtctgaatgagttgcttccgcgcctccatttcggaaaacggcaccatcagccacgtgtgtccaggcaagctctccacgagcgctgtgtagtctgcctgctcttggtcgaccgacaccactatgatagcgaacttctcaccggctgcatggagtcgctcactcaagatcgtcagtagcttggtcagtttccggcaggctacagacgtcgattgtgcaaaataaataccgacgacagcttccggatcgatatctgccactgtgcgggtgccttgcaaagaatcttgcagcgagatggtcgacagcgtgcgcagcgcattgtccagcgtgccttcagggacgcccttggccgggttttcagcgatttccagtcccttgacgacctgctggaagagacggtagcgcagcttgtacaaaatcgcgtactccacctcgtcgttcgtgaaggccttgctccggagacacagataccgtattgcctcgatcacgctcttgcagaagccgagctggctgcgttgcgccgtgtgtacgcccccaagagctgcgcttgtccaatctgtaggagcgcgctgctccgtggcttcactcgccagcggcagcagcctgtcgcctgcgagccacggcagcaacacgtcgtagatcgtctccgcgcggtggtactcggacgggggcttgcgcacccagagcgagaacagcagcgtccagaaggccatgtccaggaaccgaacagcagggatgccgcctagttggatgcagggctgcacgcggatcttgtcggcggcgctgccctcgaccttgcaggggtggtacatctcagcgccggggcctttgttgcacactgtgaacgagtactcggcgtcgccggtcttctccagcacgtagatgatggagtggcttgtagtattacccacgtagccgccgggcacgagcacgggctcgcccggctgcagcttggccagctcggccttccactcggccagaaaggcctggaactgcacggcgtcctccaccttggctcctttctcggcccactgcgcgcaggacgccagctggggcagcagtgtcgtctgcagcacgcgctcctgctccaccgagagcgagaacgtcacggggtcctcgtcagcggcgtttgaaggttgcgattgcggctgcagcagctgcgtgagacccgagagcgcgcccacgagcgcctgcgggtctccgccggcctcgtacggcgtggcgcgcaggtacgggtcgccgaagaggcccaggaaggccgcggagcgccacgcggtcatcgctgctagtgtcgtagctctcttcttctcctctctctcttctcctccttccttcctcttggacgctcaactcaacccacgcgagaagaacggggaatgaaggtctcggatcgccgcaaagatcgcgactggaagaaatgcaggtgatgcattggttgctggcgtcgtaggtgattggacaaaaagtcgacgccgatcttttaaagatttcccgctacgttgcgcgtccagcagccgaaagttgcgtagcgcagtcatttcagcacaatgaaatgactgcaccattttgttgtaccgccacacaatcggcgcgaaatgactgcaccgttttcattcggggcgccccgcctgtgcccgaacaagctggtgacgaatctgagtacgagcgcgcgcaggcaggcaggctcgtgccatgtggacgcccccgccgactcaccgcgatgcccaggatcgctcctcctgcctgcttgcgcgcgtcgctgttaaaaaaatatcgtagtctccgcctgtcttcttgctggccaccagttcctgcaggagagtacgtcagcgcatcggtttgacattttttcgtggcattgtgattggctgggctgcgacagggggtgcggcgctgggctgctgtgcctcggaccgcatgtaatttgggccagcacttcagctttcgcctcgcagccgccgcatcgccaccgagtcctcagtcgagtccccacggccctccacctcctccgaccacgaccacgacgacagactgaacttttacgatggtgttgacggcggcgaggcttgtgtgcgtcaaccgcgacggcgtcagtgagctctcacacgtgtggggcgccatggaccagtacctggactactccagtgcgtggaccctcgagagcgcggcggcccaagggatgaagttcctggtgcagcacctggcgctcacagcccccaagcagccgcaggaggacagcaactcgctcgtcatggacttcgcggcctgcaacggacacctcgacatcctcacgtggctgcacaacacggagcagctcagcggctgctccacgcgcgccatggacgacgccgccaagaacgggcacctcccgatcgtccagtggctgcacgagaaccgcagcgagggatgcaccaccaaggccatggactacgccgccagcagtggccatctcgccgtcgttgaatggctgcaccagcaccgctcggaaggctgcacgacgcgtgccatggatctcgccgcgcagaatggacagctgcacgtgctgcagtggctgcacggccaccggaccgagggttgcacgctgagcgcggtgaactatgcggcgacggagggccacttgaacatcgtgcgctggctgtgtgaagtgcgcaaggaggagtgctcgtccaccgccatggtcaacgctgcgcgcggaggacacctgtacatcctcgagtacctcggcgagcactttccccaactgttcgagagcgtcggtcccaagatggtgcacgctgcgattgccaatggacaagcggcgattctcacgtggctcatcgccgtgctgccggtcaagtcgctcaagtgcgaggaggctgccggttcgtggatgaatgtcgcgtctgagtacggccaggttggaatcctcaagtggttccacgaccacgccacggcgctgccgatgagcgtagacggccacctccccgcctgcacagtggaagccatcgagaaggcggcgcgcaacggccacagcgacgttctggtctacctgtacgagaacgacctggtgaaccttacggtcgagtcggacgccatgagcgcgctcgttgccgccgtcgaagggggtcaccgcaactgcgtcgagtggctcgtggcgcacttccgcgatctgtacgagcaaagctcgcctgcgtcgaccaccgcaatggatgcagctgcggccgtcggtcacgtggatatcctccagttcctgcgtgacgatccgaccacgagcgcgtggcaatcgagttccaaggccgtcgacgaggctgctcgtcagggcttcgtggatgtcctgcgctggctgcacttcgaccgctgccactacgtcgcggagcaggaggagcagccgaccgacgatgacgacgcgtccagcgacgaggaggacgcggagccgatcgacgcgcgttggacgcccatggcgctggagctggcggccaccaacggccatctgccagtggtccagtggctcaccgagcaccaccgcgaggtctgcagcaacttcgaggctttcaacgccgccgcctacatggaccacctggaggttgcgcagttcctctacagtgacgtccgcagtgcgtgctccgtggagcaggcgctggagcacgcggaggaaggcggcgccgaggacacgctcgcctggctcgagggtctcaactgagactgcagcgcagacatggctacagttcgcagttgaggccccacttcaagatttttgcagataaattcctatagacccaacctagattcatgctctttcgtaagacgatactggtccctagagagcataccgtaagacaaagcgtcttacgttttgcaatcaacgtattttgattacatcttgattttagtatatcagtggctacattgtattttgtcactcaaaacgtaagacagtttgtcggacaccagtttgcgccatattattggtcaaaagctctacttgacgtgcagagctgcatgtgcatgctcgggcccactcaaccacgacagcggtgcggatgcaggctgtgttggtggcacctttgttcgccaagacgacgcagttgcatggcgcgtaggtccgtcgacagcaggatgatattctggctgcagccacggcggccgcgccaggccttgcgtgaagccttagcgctaaggctgttctgatctgttgctcttaaaatgccacgtccagagcttttcagtgcctggatggtaacgaatagtgtcacgagggaaatattgtaggagttttcgtactgtcaggttgcaatgtacgtatcatgatgcgggcaagccttccttcaataacgtggttagttacgtagcataagaggcagcgattctagagcgcttataaccgcgccagtctattgctgtctgttaagcttgaatctacgtagtgtttccgtttcggctttgttgacaagtttctagagagtgctcgagtgtacattctagtcgtttgctattcaatgtacgctcaagcacaattcagttctccgtgtaccaaccgcgtcgtatcctccgaagggcatctccctacttacgccgactacgcggcttcatggaagagctcctcggacctcataaaatatgtataatacgcactttcatttgaaggacctggcatttagtaggtcgctagttaggccaaataactgtgatgcacttcacattactacgaaatcgaaaacgaaacaaatacacgttcatgctgccgattctgctcgtcagcacggctatccgttgctggtgcatgccacgacggcgacgcagacggcccggccaagggcatacagggacaacaccacgcataatattagccaatcacatggctaaatttgatttgtcgtcaaactgtcttacgaatgctcgacacaagtgatttatatgatcccaaaactagacgtaatagagggtgtttacagtcaaaatggagcgctgtgtcgtcaccttcgcagcggcgacgcgcgcgtgcgtgacgctgttggcgctggccacggccgccatcgtgacgccctatgacacctcttcgcacctgcaggcgggcggctcctcgctcgcggcgctgagcaactgggacggcgtctacttctcgcacatcgcgcggagcggctacgacttcgagcacttccacgccttcttcccgctctacccgctgctggcccgatggctcgcgcatctgcttcctctagacgaagcgtcggcggtggtggccagcggatgggtgatcagcaacgcgagcttcgtgctggccgcgctctgcctctatcgcctgggttgcgtcgtgctgcgggacgaggtggttgcgcgacgagcggcctacctcttctgcgtggcgccctccagcatcttcatgtcggcagtgtactcggagagtctcatgtgtctgctgagcttcagcggcatgtacttcctggccagacacgcgcaagcgcccaagcctcgtcgagcgttccgtgacctcgtgtactgcgcgctgctgtttggcgcggcctccgcgacgcgctccaacggcattctactctcgtgtacgttcaattgcaatttattgtgcagaggtggtggcccattactaagcgttgtggttgtctaccagtgtttattgcgtggcatcgagtgacagtgtcgccatcgcccagggagctattgggcttttggatacgcactgcagtcctcggtgcgctagcagttgggccgcaagtggcgtactttgtagtggcgatggtgccgtattgcccttcaattgtgcagcggttcggcggcgaggcgttggctacgggtgctgagatgcaggaccggagctggtgcgccaaggctgtgcccaactttacagccatgtacacgtttatccagagcgagtattggaatgtggggctgttccgctactacgagctgaagcaggtgccgaacttcctcctcgcagcgccgataattgggctaagcttgcacgcacttcaaggatactttcgaggactagtcgtgccaggacgaccgagcttcgcatctcaggagcaacaagtgcgcagttggcgaggcactgcgctcactccgtactacgtgcactggctcttcctggtggtgaacgcgctgctcgtggtgcacatccaggtgaccacgaggctcctgtgcgcgtgccctccgttgttctggcacccagcggctctgctctgtggatctaccgggaagaggaaggagtcgccaattttgacaacctacggccgacttgttgtgggctactttctgctcttcacagtgctgggcagcgtgctctttccttccttctacccatggacataactttgaatccaaaaggaataaccaaaacacgtattataataacatccatcggcgtctgcaccatgaacgtcgtacctcccttcgccgatcacggtgttcaaaagtatactcttcaccgcagcgaagacttcttgatcttgagctttttcgccaagcgatcacgtgctgagcccgctttgcgcttccggccgctgcgatcgtggctgttgtggctgttgtggctgctatagctgtgtccactgctagctccagcggattgcggggtaagcggcagcggcggtcttacgtccacagagtgcgaggaaggaggatccgttctcgaagacgcaggagaatatccccgaagcatgagccctttacctcttggcgacggtgtcacagcagtaggaggtggagcatggcgctccccttccctcgactcagcacgcgaatgacttctacttgaaggactgcttccctgtaaagatcgtccacgatcccggtgtgaagagcttccggacgcagaggagcgctctcgctccctctcacttcgtcgcttcagatgtcgctcatgccttgaagccctggataccactgaagggggtggaggtgtcgatggaggcggcggcggtgaatacggcggcgagacggctgggactggagggggtggaggcacttgggcatgtggagttttcctctcgaccttcggcgacgcattaacctcagagcgtctacttctgtgcgcgcgagtcggcgttgtcaacatatcgatagaccgagctgcagtccgcacatccacggcaacgaccggggacgcatcgctgcttttccggtggcggcgtgatgaatcggaatggcttcgcttccgctgtcgttcacgactgctgcttcccttcttggacgatgacttgcggcggcgtgcgttcttcacgcagcgcggacaccgataatcgtccggaggctcctccgtcatcgggatgccaacgcacatcgtatgctgccacgttttgcagctttcacactccaccatgcgctggccgtcatcgtggttgggcatccgacgaatagaacacacacagtcgaacatccagccacaccggaaacacaagaacttctcctgcgcaacagcctctggctgtttgtcagagcacttggcgtgcacccagtgcgaacagctatcgcactggatcatggaggttccgtcgtcgtagttcttcttcttcagcccacaggagcagtccaccatccactcgtcctcagcttcatcttgatcctgtggagccatcttcacttcggcagtgccagcgctgccgttcgtatggttccgctcgaggtgcgtagatccgttggacaacgagtcgctttgcttcgagtgtcgtcgtttgggcggcggtgccttcttcttctttttcgagcgctgagcctcgcgtcgctcctgctgcctctgcctggcgtccgccaccacctccttgagcttctccgtcaactgcaactccttctgcgccgcctgctggcggaacgcaatgagcgtgtccacgggtgccgcaggcaattgcgggtacgagttctccaggtccgagcttccatcgctctcgccgctcgcgtcctcgtctgccgggtccactccgttgtgcagcttgtccttctcgtcgtccgtgtcgatcaggacgccgtcgtcctcttcctcctcttcttcatcgtcactctcagccgagctgtcactgctgctactagagtcactgctattgccgtcgtcatccttcttcttcttctcttcatcctcatcatcctttttcttcttctggtcgtcgcctccgtcaccgttgcctccgttgtcaccgttagcaggtggcggcggcgcctcgtcttcattgtcactggagctgtcactggagctggagcttgcactgctgtcactgctgctgctactgctgtcactaatgctgctgctggacgaggacggacacggactgctggccggtcgctcctgtcggccgctctctcctccgctgctctccaccacggcctcttgaccagccatcgactcttcatcttctatctgcagcgtctggaagccccccagcgccgctagatgcgcgccaacgcccgttagaagctgagcaagccactcgcccgacgtcacttcaggcgggttgacaccaggcgccggcgcgcggatctccgcggccacggacgcgtctccggcgcgcagcatcatcagctgcacgctcagcatcttgcgcgcctgccccctcgagccgcccgcgcacgcaacagatggagctcttccgccacgcgtgacaagccttgctgcggtctccggtcacttgacttgagtatggacagataggcgaagctcgacgggacttccggatagtcggggagaaaacgttccttgacttcgcagtagtcaaatggagcttgttacgacacggaatgattacagcataacaattgggtcaaatggagaatttgggggcaatctttgcccagatgttaaaaagagcggtgtgcagcacaccagtcacatcgagcggataccaaaaaagctgaggcaggtaggaatgaccggccagtggacgctgctgcgccgctccgcgctgctcctggagcgcggcgcgggcgtgacgagcgcctctgcaggtctgacgctgggcgtgcgtcgcttcggcgcggcgtcggtgcccaaggcccagcgcgcgcgcaacttcaagggcaacaagcgccagccgcagaagtcggcggaggcgacgccgcagccgcccaaggccgaggccggcaagcccaagcagcaacagcagccgcagcagcagcagcgacacaagaagcgccgcgcaaagaaggtcgtggaccaggaggcgcccgtgttcaccaacaagttccagaacctgctgagcttcgcgttcgaggacgtgagcagcgagccgacgccggcgcccaccaagcagccgaagaaggcgcccgaggcgtcgtcgctcgacctgctggacggtattggagctgccaccaaggtggacgacagccccgagctgacgctagcccagctgggcctcggcttcgatgacgatgatgactcgttcgccaagaggcagcccaagcacccgcgacagaagcccaagaagaccaagctcttcacaggcgacaaggacccgtccacggtgttggcagcgctcggcatcccgtcggacggagagagcgaccgcaacgacggcccgcccatgagccgcaagtccatgaagatgaacacgaagcgcaagaagggcacgcgcaacctgctcaagaacttccagttcgagaacagcatcttcgactcgaccgcggacttgttcggcgacattgattgggaggagcgcagcgatgtggaggaccgcgagcgccgccgctcccagaggcagcagcgcaaggaggctaagcgcaagcccaaggagcagctgcccgcgcaggaggtggaaatccccacgtcgctcacggtgaaggacctggctgagcgcatgagcgtgaagacgcgcgttgtgttccgcgcgctcaaggatctgggcgagaacgggctcaacgaggagtcggtgctgaccaacgacatcgcggagctggtggtggactcgcagaacatggtgcccgtgctgctcccgccggacttcgttgatcttgagctgaccccgctgccagaggattgctcgagcttcccagtgagaccgccagttgtgtctgtgatgggccacgttgatcacggcaagacgacgctgctggatgcgcttcgcaaatcgaaggttgcagctacggaggcgggtggcattactcaacgcattggtgccttctctgtggagctgggcaagaagtttggggcacagtcgaatgttaccttcatcgatacaccgggtcacgccgcgttcagcaacatgcgatctcgtggctcggagttgacggacctgctcgtgctggtggtcgccgctgacgatggtgtgcgcccacagactgtggaagtggcacgtcttgccatcaagaacaacgttccgcttgtagtggctgtcaccaagatggacatgcacggccacgacaaggacgaggtgaccaatcgtctgggtagcgagctgctgaaccaaggtgtcgttgttgagagtatgggcggagacacgccgatggtgtgcgtgtcgggcaagactggcgagggcctcgaccaactgaaggaaacgattgcgctgcacgctgagatgctggatctgcgtgcggatacgtctgtagcgggtgaagccgtcgtgcttgaggcgaatgtggcacggggcgttggtactcaggtggacacgattgtcaagtggggcacagtgaagcagggctcctttgtggtgtgtggactggagtacggtaaggtgcgggcactggtcgaccaggctggcaagcgcgtgaagcaaatgacacctggtaaccctgtgcgagtgatcggactaaaggggctgcctgagggtggtgtcgctttgctgtctgttgccaccgaggaacgtgccaaggaggtagttgcagcacgcgaggctatgctcgactgggaccaaatggccaaggctgaagaggaggaagctgagattcagggagatgacggttctcatcgccgtcgccgccgttttgctggcgcccgccgtaagtggcaacaggtggaagtgcgacgacgtgaggccgctgaagaggctaagcgtgtggctgcgctgaagccaggagacgaaggctatatcgccaatgtggtccccatcattgttaagacggactctgtgggagtcatctcggctatcgacgagctcattgcctccctgccatccgacgaggccgcgatcaagtgtattatgtctgccgtcggcccagtaacatcatcggatattgtcatggctgaggccacaggcgccaccatctactcgttcaacatcaagcacccagcgtccatcgaccaagaggcactacagaagcaggtgactctgcgccagcaccgcgtggtctacagtctcctggacgacatcaaggagctgctgcaggacaacctccagggtgtggtggtgcacgatgtgatcggctcggctgaggtgatccagtccatcccgatctcgacgtccggaagtcgcaccaccaacatcgctggttgcaaggtgacttcgggctcgctcaacatgcaggccaagtaccgactcgtgcgcgacggcgagacaataatcgagaacgtcgatatggcgtccatgcgtcacttccagcagaaggtgtcggaagtcaacaagggccaagagtgcggactccagctcgcgggcacggacgagttccagcccggcgacattctcgaggcgtacaccaccaaggtggtgaagcccgagctctagatttggaccgtcgtgtctttagatgtccacatccattaaagcatagatatgacttggtagactggcaaaggcacccgcaggatataaagttgttgacactatcataacggtacctataccacgggcgatgtgggattgtgttgctgaagacaacggcaatcttctcgtgcaatctgtttaccaagttctgtcgtacagcgtgttgctgaggagaagaagagcgggttgcaatcctcctgtgcacaatgtttacaacttgatggcgccaatcccgctgaaaccatgtcgctgctctcatcccgagccttactcactaacatgggcgtcctactgatgcctattccaagcgtgcgatggtgctggtggttgagcattattagccgaaactcgaaataggccatcggtcaaaggagaccgagaccgacccaaccataagcagtgacaatcgatctgaaaacgatgcaacttcctgtctgatcgccttcagtagctcatttgcagttttacgccttccgacagagcacacttggccgttggtatcctccatccagcagcagcaaaaccccagccagagagattattgatgggggactctgaaaaggtcggtgggtcgactcgcccccgaccgggaggccccggctttctgaggacgcagcagactctgctggccaagagctggttgcttaagaagcgtcactgggtggccatgctgctggagattttcctgccggtgctcttcatcctcctcatcacagctctcaagaggctctcaaccgacgtccaagtccctgctggatggagcagcaccgcgtcggacggcaagtccttctcgctcatgcagaacgggtacctcgtccaggagccgacgatgaacggactcatgacgtacttggcggttaggacggcgtccgagatccacaacacgactggagtgtcaggtacagaacaggaggtctgcgccttcagtgtcggctacggaggcttcgtgagcaccgacacctcatcgcagtacgcggtcctgccgtcctgccggagctacttcaccccgtacaagctggccatcgccccggacaacgacttcactcgcaaatacttcttcgagacggtcaagcaatggtacccccgcgtgatgttgaacacaagcatgggggtgacgatgccgagcctcgaggacagcgtcatcttcttcgacacggaggacgccatggagagctacatcggagaagtgggctatggcaaagggttcgcgacgcccatcgtgtatgcggcgttggtgtttgaccagtacccagaaggcgacaagatcggcacgttccagtcgatcgagtactcggtccgcatgaactcgacgcaaggcggaggaggatccccgggggttgtgccacgcacactgggagacccggcgttcgagtcgccgttccagcgcaccatcgagcaggcttactactcgtcgtacgcgtcgcgcgggttcatgacgctgcagactctggtcgctcgcttcgtcaactgcatgcccgactgggatgaatccacgaaatcgaccacgggcgtgtgcaagcagaagctctcgacggccgtgtccaacaccgctaacgacgacaggcttttccacgctgtggacggcgacgtgctcctgggcgctgcgctctctgtgccatttgccagctctggtacgggttggcagacgttgctgacggccagtggacgtgagcagcttctggtgcctctgcgtcaagctccgcaaccttacttcgcaacgactgtggccccgttcccgatcgacagcttcctttccgccccgttctacgaccaagtgagcagcgtgttcccgctcgtcttcatcctggcctacctgtacgccatctcgcgagtgctagtggtcctgatccaggagaaggagacgcgctcgcgtgagtacctcaagatcctgggcatgtcggagagcgccatcatcctgtcgtggtacatcacgtactttgtcatcttcctcatcagcgccatcctccaggccatcgcaagcaccgccggtctgttcccgaacagcgaccccggtctcatcttcctcttcttcctgctcttttcgctcagcgtgctcgcgttcggcttcttcatgagcacgctcttctcccgctcgcgcactgggtcgttcgctggcatggtgctcttcttcttcatgtacttcgtgtccagcggcttctcgtccacatcctcgattggttccaagacgggcgcgtgcatcttgccacccgtggcgctttcgttcggagttcagtcgctggccacggccgagtcaaccggtgtgggcatgagcttcgagtcgtcaagcactgtggtcgacaactttaagttcgggtcttccatcggcatgctcttcttcgacatcatcctgtacacgctgctaggactctatctcgagcgagtcatcccccgcgagtacggcaccgtcgagaaatggtacttccccctgcagccgagctactgggtcagaagcttccgcgccaaaagatgcttgagtaaggttaacgatgtggccaacaacgtcgtcaacgggagtcacgcggtgctcgacattgagaacccgaacatggaggtcgccagtgaggagctgcgccaccaggaacgaacgggcgaggcgctggtgatcagcgatatcaagaaggagttcgtcgtgcccggaggaatcaagcgcgccgttcgtggcgtgagtctcgccatgtacaaggaccagatcacgtgcttgttgggccacaacggcgcaggcaaaaccacgctcatctcgatgctcacgggtatgatcgcgccttccgctggtgatgcctcgttccgcgggctgtcactggtgcacgacatggccgaaatccgacagtctttgggactctgcttccagcacgatgtgctttacagcgaactcacagtcgaggagcacttgctgttctatggacgcgtgaagggctatcgcggtgcagcgctcaaagaggaggtgatcacgaagatcactgaagtgggtctcaccgagaagcgacacgtcttcgcgggctcgctctccggcggcatgaagcgtaagctgtcggtggctatctgcctgctcggcgacagctcgctcgtgttcttggacgagcccacgagcggaatggacccgtacagtcgacgcagcacgtgggagatcctgctcaacaaccgcgccaaccgagtcatggtcctcacgacccacttcatggacgaagccgacattctgggggaccgcatcgctatcatggccgaaggacaactgcgctgctgcgggtcgtccctcttcctgaagaaccggtacggtgctggatacaacttcacgctggtcaagagcagtgaccccgctaagccctgcaaggagacccagctccattcccttgtcacggaacgtgttccttccgccaaggtgttgagcaacgtcggcgcggagatcgccttccagctgccgctagactccaccgcgtccttccccgcgctgtttgaggagctggacagcaagatgggcgacttgggcgtgctctcgtatggcatttcagtcacgacgctcgaggaagtcttcatcaaagtggccgaggccaacgacgaggacaaccagcacaccctgaacaagaacgccgcaagtcctggtgctgccgacgctggtcttccacccggtggcccaaccatcgcgagccttacgggtatgaccatgttcttcgtgcacctttcagcgctcctgctcaagcgcttccgcatcgccaagcgcgatcgccgagtcatcatcttcagtgcgctcctccctgtgacgctgctggctgccgggtttattattctcaagaccagctcactcacgcggtcggacgagaaactcgcactcgccaccgacgacttcgaagcttcagtgcccaatgtcccgtacttctgcgaggcggatgactccaagtggtgctccagtacgctggacctcttcacaggcggcaaaccctcccccttcacgtccgcggatattccttcaccgccgtacacgacatggccgaccaccgtcttcggcgttaactacactgaggcagaccttgcgagctacagcaacccacacagcaacgagtactgcctgcgcatgggagatcagatctaccagcgtggcttcggcaaggacgacgacggcaaggtcattcaaccccccgtcaagggccagtacggtggctacctcgtgcacgggtccgagagtgagcaaatgttcggctaccacctcttcgtgaacactaccgcagcgcacggcgcagtcatcttcaaggcgttgatggaccaagctctgtatcgcttcatggccggcagcggatctggagcgaccgacgtgactttgaaggcgaacacgtacccgctccccatgaccgcagccactcaagccctctttgggtcgttcctggccttcacggcgtgcatcttcatcgttatcgccttcgcgttcttcccggcctccatcgtcggcttcctcgtgaaagagaagcaagccgagcacaactccaagcaccagcagctcgtgtcgggcgtgagtttaccggccttctggctggccaactacctctgggatctgctcacgtacgtcatcccgttcatcgcggccatcgtgctcatccagatcttcgacatcgcggccttcaccggcaacgactgcgtgagctgcaccagccagacgttcccagcgatcgtgctgctcttcatcctcttcgggctggccatttgtccgttcacctactgcctctcgtacttcttcaaggagcacgcttccgcgcagacgtacacgatcatggccaacttcttgctaggcgttgtgctcatggtcgtgtccttcatcctggacgtcgtaagtacgagcagcgccgatgccaacaaagtcctcaagttcttctggcgcctcagtccgctcttcaacctgggcagtgcgctgctcaaccagtgcctcagcgagatcacggcagccttcggtcgcacatccgggacggtcagcccgttcgacatggatgtcatgggctgggagctgctctacctggcgctggatgccatcatcttcttcacggtcgcggttggcatcgacttcctactgagcttcccgaagattaaagccgcgatcttcaaggacccgcacctggaggacgctccgtatgaagaggacgaggacgtggcccgcgaggctgaacgcgtacgcagtggcggagctgacggcgacgctgtgaagctgcttggcattcgcaaggtgtacaatggcaacaaggtggccgtgcgcaacttgtcgttcggtctgcccaagggcgaatgcttcggctacttgggtatcaacggagctggcaagaccacgaccatgaagatgatgacaggcgacatcctcccgaccacgggcagcggcacacttggcggcttcgacatcctcggagagcaactggaagtccgtcgcttgatcggctactgcccgcagtttgacgcgctgttcgagctgatgtcggtgcgcgagcacctggagctcttcgcgcgtatcaagggcgtatcgagcgcgaacttgaacgacgtcgtcaagattctcatgcaccagatgaacttggacgacttcgagaacaaactggccgggacgctcagtggcggcaacaagcgcaagctctcggtggccatcgctctgatcgggtcgccgccgattgtgttcctggacgagccctcgactggcatggaccccgtgtctcgccgcttcatgtggaatgtcatcgctgcgatttccacgcagcgcaaggaatcgaccatcatcctcaccacgcactcgatggaggagtgtgaggcgctctgcacgcgagtgggcatcatggtcggtggtcgtctgcgatgtcttggcagcgtgcagcacctgaagcaccgcttcggagacggcttgatgctcgagctgaagctaatgggtacgcccacgcatgacatcgacgcgcgcgtggcttccgtcttcggtggcagcgcctcgacgacgacgttcccccgtgccgagctgcgcgctaagtgcgaggcgctgggcgacgcgtcttgggccgacaagatcgtcatgagtcacgccactggttacgccttggcgactgcactcgaacgcgacgggaccatgcgtcttggcatgctgtgcgcgtggtgggcagctgaagagcgcttcttagggctagacgcgttcctgcgtgagagcttcgcggtagatgccaacactggagtgaagatgctggagcggcagaacgacatgtgtcgatacaagctcacgggccaggtgccgcgactggcgagtgtctttagacgcgtggaggccagcaagcagcagctcggcatccgcgagtacgcagtttcgcaaactacgcttgagcagatcttcaacaacttcgcaggtcagcagagcgaggagaagggcgtcgcgcgcggcattggcggctagatcacgcgctacactttccagcacacaaacatcataatataacattcatatcatacacagcacaataaccacgcgcggagagcgtctacatagtaagtcattagagatgcattgatgcgcgtgttcaaaagtgaccgcttatctttttcggcgcccaaacgcttcagcgccgtccttgttgtctatcaccgtcatggctgggtctgtatttacaggtccgcaggcatgacacagttgccgtacagggcctcgtacgtctcgcgctcgcgactgcattcacacaatacacccacaaatcgttagtctaaacagttccaagctgacagcttcatcatcatcacacagaaattcacgtacatgagggagtcgctgccgtccgagcggatgagcacctcgggcgcgcgcagcttgccgttgtactggaagcccatcgagtgcgagtgcgcgcccgtgtcgtggatcacgaagaggtcgcccacctgcgccttgggcagcgggcggtctttggcgaaccagtcgttgttctcgcagagtgtgccgacgacgtgcgagggggagacttcgccgccctcgcgcttggggatggagatctcgtggtacgcgccgtacatgccggggcgcatgaggtgcgccatgcaggcgtccacgccgtagtagcggccgtacgtctccttaatggcctcgcagcgcgtgaccagccagccgaaggggcccgtcatgaagcggccgttctccatgcagaggcgcggcagcgtctcgagtccgtgctccttcatggcctcgtcgaagacctcgcgcagcatcgtggcgatggcctcgacgttgaccgtctcctggtccttgcggtacgggatgcccagtccgccgccgatgttcatgaactcgaactcgatgccgagctccttcttgagctgcacgatggtgttgaacagcaccgtgaccgtctcgcgccagtactcctggttcatgacgcacgagcccgtcatcatgtggatgccgaagcgcgtggcgcccgcctgctgcgccttgcggtaggcctcgacgatctggaacgggggcacgccgaacttggcgtccgggccgcccagcacgttggacgcggtctccgagtcggtgcggccgaggcccgggttgaggcggaagctcatgagctcggggcacttgccgcgcgcggccacgaggctgtccacgagcgacacgtcgtccaggttcatgatgacgccctggtcaaaggccgtggccaggtccttctgcgccgtgaagttggacgtgaagatgacctggtcgccgggcacgcccagctccttgacgatgtgcagctcggccgacgagctgcaatccatgccgcagccctcctgcttgagcaccttgaggatggccgggttgggcagcgccttgacggcgtagaactgctggaagtcggggaagtgcgcgcggaaggcggccagcaggcggcgcgcgttctcgcggatcagctgctcgtcgtagatctgcagcggcgtgccgtaggtctcggcaagcgcgtccaggcgctcgagcgcgggcgtggggagcggcagcggcatggtatgtacagacaagtgagctcgaggcggccagttgaggtgtgtcacctcagccagccaccattgtgttaagaccgatgttcaagatgggtacgcgggctcagccaatcgcagcgccggaacgagctcttccaatcggagcggtggaagagcagtccgacggcgccagcgggattattatcgcctctcagccgccgaggagcttcaccagcgatggcctgaaaccagtttttttaaactgcgccgagcattgtaacttgtactcgaggaagccgatggtcgagttccttgatgcacaacgcgattgagtcggctgaaaaccatttttttgttttggaagcgatgtcttgggtctacccgcaatccacacactttacaagaagcttcacccgccgccccgatacctagggccaacacagcatcctgctccgttatcgattctcttggagcggggggggggtcagactccctagctgagtttgtgcttgttgcgaagtagacgacgaaccgcacccattgcttcacgcaccttcgagtcgaaggtccgttgcactatgcaccagaccacaagcctgaagttttggcttcgataccaacgaatagtattgggctttaaggccttgtgcacgagcttcctacccaactccaacgtgagtgttacatgtagtgcggcgtaaaagaagccaattgcctaatgaatgtttcgttcgttttgtgaagatttgcccttcacagcaagttgacacttttcattttctttggtgcttcaagacgtttggcgggaactaactgcacttcacatgacggattgatcgatccatcatagcttttaactacaccacagttcatggtttacggtttaccgtcgttctactgccgcggtaccattagctcattgagccgctcttcatcttctggaaaaccgaggaggctagggagtgtttgcgctcgcccaagctgccaccgttattgtagctgctcgcggctgaaccatagcttgacgacgataggtaataatcagacggtgacgacgaggcggagcgtagcgcggggtgccccggtggtggcggggtggccagagaagcgccctttgaaggcgacaacgtcggcatgggcgcgcttgacgacgacgtcaccgattcgcagctcttgcggcgcttttgcacgcacccgatgcacacgcgcacgctggtagaacccacgtccggtagagcgacatccattttgggacagcactcggaacagcaaatttctccacacaaacgacagtggtgacggcgacgcgataacccgaacttcgcatcgcatatacggcaccccagacgctcgcgattgtgcacccagtgcggcgcattcacgagcagtgactgcgatagacgtcgactggtgagaacctcttccagacgtgcgatcttggcgcacagcgctcgtagcttcgctcgtcgagatgccatgggcagctgcgctttctccagaatcgacgccacgaactgcacctcgacgtagccgtcgcgcccgcgtggttgacgaaccatgaatcctgttggctgaaggtccgtgggcttggagccgacctcgtccagccacgactgacagtgcgggctgtagcaagactgcagcgtgcgcacgtacatcggcgacgagtccgcgttctcgtcccagtcgttcaccaaaatgcactcgtaatccagcagacagtaggtagtccgcgaagcaaacatgcggctcgacttctcgccaacaacccacttgatgctgagattgccctggtggcccgaagctgccattgctgcgcggtagtcctccatgtacgtgggggacaagtacggccccgtattcgttgcccgtgccgtcggagtcgcgttgcctgttagtcgatcgacttcaagtgagtcgccgcgggtgcctcgcgcgcgtccggtcgaggactcccgactgatccctgtgaagggctgtacatcctcttcgctctccaggtccgagtccgagtacgacgactcgctgtcgcagtcaagtgtcgacgcctgggacgccattcgctgcggaatcgcctcaccattgttattgatgttggtattgttgttgctgcggcgcagacgcttcttcttgcggcggtagacgaacgctgacgaggtggtgcgcacccccacgaggtgctgcatggggagttccatgtcctctctgtccgagcgcacgagcagatccacgacctcttcgatggaggacggcagcagcgctacgcacttgacgagatactgctggagcaccttggaggcgaacacgttgcccagcccggccgctgacgacgcggcgtcccactcggagctgtcgttctcccatgcgctggcgccgccgcctccgttcccgttggccgccgctgggtccgcgctggagctggaggggtcgtcgccgccctcgctgccgctgacgagcgagttcatcgtgttccagaggaacgtgttggtgccgatggggcacacgcgctccatgacgcgcaccttgatggcgccgcccgtacccgggttgtccgtggtggacacggctgcggccgccgcgctggcgctcacggggctccagttgaccgagtccacggcgccgaagccgaagaggctcagcgacgtgcgcgcctgcgactcgaggtcctcctccacggcgcgggagagcgtggcgctcgtgagcggcgccggctgcagcgacagcgcgctcgacatgctctgcgtgctgctcgtgggcttcagcagccgcacggtgctgcggttcgccatggctcaagctgctgctgctggctgcgtgtgatcgccctcggcccgttgaccccacgccgccgtgcaggtctggaagagagataatgagagccctggggtccgtccgtcaaacgcagggcgacggcacgaggggagaggaacgacggtttgtgctggcacgcacgacaccgtattttcgttggcttaatcaaaatactacgcagtagcataccctgctcaaagcaatacagggtgtgggggtaggatggtgtattacttaatgaatatatcctatcgtgtagaatattgatccgacccaaatgcgaccgtagcgacaccttgggtccgtgacacggaggctcatatacaggtatgcggtctcttagagttagcgtcactgtcagagcagcgcgataacaggtccgtaatgtgcgtggactccgcgcgtggagttcaccggtcgtcgctgttgcggtgccgagcgccatgtggttgtcgagcgggcgaagggcaactggcatcaggcggctcaagtcggggaccggctttgccccttgcttgaggacgacgcgagtcagcgatgacaggccaaggcaggagcgggggtacacatgcattcatgtacatgtgcatcggtgcgggtgacgaacgttttgcatcaaagagcaactgcatttggcaaccactaatacgcatactcactcagggctatttgattcaaagtgcttccatgaacatgaggtccgagtcgcctccgtcgccggagtttgtgttgttcccgccgctgttgttctgcccagagccgcccgagttgttgcccccgtcctgtcccatgaagccgtccatatctagcaagtccatgctagagaaatttgtgggcgagaggtcgttcgagaagctcatgaagccggacgacgtcccggtagacccaagatttgacggcatctgcagcaagccgctgctgtccattccaccgtacagcgactcgtccaggcttaacgaagacgtatcacctcgagaggttggcggtcctgactgctgcggcttttgctgctgctgctggccctggggttgctgctgagactgctgggacggctgaccttgaggctgctgctgctgctgctgctgcggagggcgcgactgctgctgctgctggtgctgctgctgaggggcaccttgctggggctgctgtgaagcggtttgctgctgaggctgtgcggcctggggctggctagtcggagcttgcggaccacgctgggcctgctgctgcgctaattgtcgctgctgcgggttctgctggccagcgggcgcctgctgtccattctgctggttcggttggttcccctgctgagcagagagatgcccttgctgcgtctgtcccgggtgcgctcccttctgctgctgctgctgctgcatcatttgttgttgctgcattatttgctgctgacgagcttgggcctgcatccgctgttgctgctgctgcatttgctgagcgcgctgctgcatgagatactgctgctgcttctgctgtaacgacaggttttgtccgggcgcgtttacgttggccgggttctgctgctgctgggcctgttgctgctggttggggccaggctgctgttgctgcaagtgcattgccgaagaattgggcgggacggcaccagcggaagggccagcgtttccagcggggtttgctgctgtggaggggttcacaccggccgggttggggccgttcccgctgccaacattgggggtgaagctgcgtttgtccgtctccgtacgcagcttctttaaatacgggttcacaatctttacgatgtacttgtacaccttgtccagctcctcgattttgcgcggagcatgggtcgtcttgtcctcgttgagaatactcgcgcacagttgcacgtagctgagaagataccgcaactttttcttctgctcggtctcgtcgtggcccttcatgtgatccacgtacttcttgaacgcgctgtgcaccttctccacgtcgtcgtgatacttggccttcagcgctgcgtgttgccgccagtactcggccgtcatatcaccaagaacggttccatcaggtttcgctgaccgcggtgtggtattcgctccgttgggagccgccgggttcgcaggcatgcctccagcacccatagccacaggcttagcttgcggctgcggctgctgctgctgaggctgctgagcaccggggtggccggcaggtccgccaaactgcgggtgtcccgggtatcctccaacctgcgcgccattagctccgggggcggctgcgcgctggttcaggttgagcgtgttgtagtaggagaagtccagcctcgagagcatgccctggttgggcagcgtctgcgccgccatgaccgcattcatgtccgtctgctgagcgcgcagcgacttgaggcgggtgaagatcttgttgatgtattcttcctgcgtgcgcgactccttgtacagcgtcagctcgtaccacgacacgttcatccagagcttgatgcccggcacggggtctgccgacacgcgcaccatctcattgtagctagacgacacacaataccaaacagggtcagatttacccatggaaattagagccaacaaggcaaacgccgccaaaagacgtacattttggcgatgagattcgcgcggtgctcgcgcgtgagctggatccgccagtccgcgccgccgacgctagcagcctgagcagcgcccggcacctgcatccccggggcggccgcggccgccgcggccgggttcatggcgttcgggttcatcttcatggccatggatcccatgttcatctggttcatctggttcatgttcatcatcatctgctgctgctgcgggacgccgtacgcgttcatggccatgccgttcatgcccatggccatggcctgcgggttggcgccgttcgcgccggccatcgccatcgacatgggcatcgacatgccgccctgcatgcccatcgcgttcacggcgtgcgggtccatcgctggctggctggctggctggctgctgggatgcgggtcactcgctcagtcactcagtcactttccgcgcgctcgggctccgttcaaatggcgcgtcgtcggccgttgcatcgctcccgccgttatgcggcggattggctgaaaaccacctcgtctcattggctgaaatacggaattagaggattggcagaaatacccgagcattggttttgtatggggaaaagtatggataagtttttaaactaaaatttgagcgtttctttggcgattggccaaaacctagcacgatcccactctcggggatgtggtacagtgtaccactatgaggacggaggtcgtgtgcgtccaagcagcacaatacccatatcatataggttttagatggagcgacacccctcctttcgacagcgaggtcaccagcaaaagctgaacttgtttctgtccagaaactgtcgtccggccgtcagccgtaccgcattaggagcattaggagcggactgcattgcatcggacggagccccgagttacgcaggccaaggaaggcgggtgccgtggccggagtcttattagggaaagccctgcatagagtcggtcagtcagtcactcggtctgccatggcgccggtgctcgtgcgcgcgctgctgctggcgctggccgctgccacgacgtcgacgtcgacggtctccgcgagctcgaacccggccgagtccctcctctcggccgtcgtgaacgtccgcaagtcgcaagccatcttctacgcgtccagcggcgccgaggaaggctggggcgcgtcactggaggcccagaagctcaaggacggcgagaagcacgccttctacccgctcgtgtacaacgcctcggcgctggacgacacgtacggctgcacgcccaaggagcagctgctcaatgccagcgccagtaacgcctcgaccgcgagcttgtcgggctccgccagtgcggcgctgcttgggctgccggacgagcccttcgtgctgctggtggaccgcggcggctgcacgttcgcagagaaggcgttctacgcgcaggagctgggcgccgccgtgctcatcgtgaccgacacgctccagcagctctacaaccgctcgagcgccgcagatgccacggaggaggagaagaagatggagttaagctgctcgcgcggctccggcaaggcggcgtgggacgcggacatcaccgacgtcacgtcttcgtcgtgggaagacgccgtgaatgttcgttcctgcacaggcagcaaccggtgctcgtcgcacatgtgcgtgccgtcgggaggcccaaacaagcaggtgtgctgcgcgtgggatatccctgacctcatgggcttcggaacgacggatgttgtgacagacaagagcctcgtgagcgatatcgtcgtggtgcggatctccatcaacgacggggactcgctgaaggagatgctgacgactggaagcgaggacgaagacggtcagctcatgatatccgtgtacgaccgtgacccgcccacgatggacccagctcaggtgatcctctggcttgttgcctgcgcgaccgtgctggtcgggtcttacaagggtgcgacgtacgagcgcacaaaggcacagctcaaggcagcattgatggctgctgatgccacctcttcagacgccatcgcccaagctcgagtggcgtacgaggaacacgacgaacaggccccggatcaggagcagctcgacctcaattcgtggcatgcgctggcattcttggtagtcggttcagggttcctggtgctgctcttcttcgtcaacgtggttatcgtggtggtcgttctcttcggcatcggctccgtgaccgccacttttcaggttatttgggagcctctcatgcggcaccttcctgtgaagtttttccacaaactgccctggcgtgatgtgatgtggcaatgggaagatatcgtggtgcccgccgcgtggagtataggggacgtggtggcgctggcgctgtccatagcaatcgcgctcttttggttcttcacgcgcttccagtcgtactcgtgggtcttccaggacattttcggtgtttgcttctgtctcgtgttcctgcgaactgcgcgccttccgaacttgaaggtggccacggtgttgctggtgctcgtcttcatgtacgatatcttcatggtcttcatttctccctacattttcaaggagagcgtcatgatcaaggtagctactggtggcgcacaaagcactgccacgggtggtgtatccagcggcttctgtctgcgctacccgacggacacaaagcacgactgtcgctccgagtcaatgcccatcctacttcgagtccccaagatgctggactggcgcgcgggtacctcgctcctgggacttggcgacatcgtattacccggattgttgctggtgttctgcgcgcgctacgactacgccactcggggtcagcttttcggacgcctgacccctccacatggcaagttgttcggtcgtcgtccgataggcgacgtgatgaatcatgcttcagcggtggccactggagccaaccgagatctggacatgctgggagctgagcaccacccgtgtcgccgcgggttgttctgcctactcatgtggggttacaccattggcctgctgctcgcgaatgtcggtgttatcgtcagtggcagcggccaaccagctctgatgtacctggtgccttgcacgctcggcctgttagcgatcgtggcatggcggcgtggcattttgaataagctctgggagggcccaccagagctcatcccagggtatgttcgtcgcgagagcaccacaagcggtggtggaggacttgaccttgaggatgtgacgcgacttcgaggattgagcatcgagccgagtaaggctgcgacgagcgagatgatccttctgcaacaacatcagggcggcgcgggcactccggtatccggtgggtcgtatgctatgagcgaagaaactcctatgggtcgcgatagccagcctggtcaagccttgcggcaagtataactttcatccccgctgtagccactttatcccccatgtaggtcatcgaacagattgaaatataggtatgtgcgttttgctgtttatgctgttcaacatcgacttcgaaacacagagcgatcaaatgcctttcacccactcgtcatcttcgccccattcgtcagccgcgtctactgcagtaagctcgtcgtccatctcggctgcaaacaacgccgaggcctcagcagcagtaggcaaagctgatgtagtagccgccattgcaggagccgcgccagtagtagctgcaggcggaggcggaacaaccgcgctcttcttgaatgtcggcaccatgccaaattgctgcagacacagaaaaaaatcaaaaaagtcagacccaaaccaccgcatccccccacaattgctatcaatacgtacgctgaacaagtcgtctacactctcgctctccttctctgctgacgcagacgcactgcggttgcttgttggcggcatgtgcgcctcatcggtcacgacttcgaaggagtcacttgagctgttggactcgacactcgatggtagcaggtcgcctttaccagcaatagcaatttcctggagctgtgcgtgttggggtggaggtggcagcgcctggctaagctggaaagggcttggactgctcttgctttgacgcggcgttgtcgggcgcagagggctgggcacagctgcaacaaacgggttcagttgcggaacctgcgcttgcgtggagttgccctcccagtcgtcccagttgtctcggttgttcgcaaaggtgtcctcctcgtagtcgtcacagtactcgtcgtcgtcatcttggctgtggctgaacggttgctcgtcgggcacctgcgtgtacgccaccttgggtcccttggatccagcgcctccagctacacttccactcgtagtcgcccccgtcgagcgtcgtttccgtccccagagcagcaggaaaatgcagcaaatacccgccagcgccatcaacaccactgggttcgtgccctgatccagatagcccggagcgcgggtgtccgcagcgtcgttcgtcacagcttcggagatcacggccggttcctgcgtgcgtagcgatggcttcgtcgtgacctccactatcgctacgggctgtgtcgtctctggctcagctgggggctctgtcgctggaggctccgtggtcacgggtgccgccgtctccgctggcattgtaggcgcctgcgtgtctggctcggcattcgcactcgcgttatccaagtcaattgtcggctcttccacgctgggctcgacctgttcgtctccatctgcaggcagctgcggggcgctggtctcagcggggggactcgtagtcaccaccaccaccagcgcctcggcgtccgggtcctgcgtgtctgcagccggcaccacggcgtcgcctccgcctgcaacttcctcagcggctccgactggttcgtcacccacgtttcgcccggcttcgccttctccgctgcccagcggcagttcgtccgccgcctgcacgagcgtccacgccatctgcagcgtcgcggcggctgcagcggccgagaccagcgcgtgtctaccggagaccatcggtccaagtcactcttcaccttgggctgaaggcgtttctctcaatcagggcgcttagtgaaaaaatcctaccttacgtcatgatgaatggctttcggtgggtcatgaaaatcagattttgtttcaagaaatcgtcaaacttcatttttgaatttgaaggtgaagttgatggacccgtcggatgcggagctggacgaggagctgcggcgcgggctcctgccgcgtgacgacgaggaggatgaggacgctgcgcctacccgaaggaagggcgctccctctatgggcgcagtggagaggctggtgctgtcgccatgggagaagtgggcggtgcacggccgcttccccttcaagctgacgctgcacgtggcgctggtgctgctcaccttcgcgcagatgcagctctacgacgcgcagaacgccgcctacatgcgcgcttcacaccgcaactggtgcgcgctgtcgttcgcagtctctcgcgcgcatcgactgacatgttggtggtgaatgctttggcgcagggccttcttctttctgccgcctgccgccgacatcggtgtcgtgtacgttcgtagctgagctgcagccgtgcactgttgttatggatctatgtgcttatttgctgtgttcgtgatgctgggtattctgtggggagcaggccgcggttccagcgcgagttttacacgatcaaccgcaccatggaggccgtgcactacctgcgagactcgtacttttcgattgggaacgagtcggtcgctaactacgagtatctgcgcacggcatcaggcgagatccaaccgctcaagctgactgtggagcgcgtgctgcctcacggtgacttggagacgcgcgaatacctcgtcactcacgacgacgagacggtggggcctttcgacccaaagatgacgctgtggcagaagaagcatttgtttcgatcgctattggcggtgaagttttccttcccgctgcgtgaccatcagtttggtaacttctatgaggagtgcttcgagtggaaggtgaacgtggggttccaggtgattgaaagcgcccatatccatgttcaactggaggactgcgaagtgtctcgatgcgcgagtacacacccgcgaccattctgggcaacggcgagacaaagcttcgtatggatgcatgctgtcgtcgccgtggtctccattgtctacatgatgctcagcctcaaggcgatccggcgatcctttcacgtgtacgctacccaagcgacaatcgcatatccttcgcccttttacctatctaatctgtgtgtttgttgtgcgttgtacttacagtatggcgcgagcaagaggtttgctgcgagatcacgctaaggaaaaaggcaagttagacaaagggctacatgacgttgcagcgcatgaggctggtgacgatagtcacccaccgagtttcgagcgcccacgcgaagcgttcggttcatggacaaaaatccccttctcgctcaagctcaaacttctcaatggcttgtacgtttgtttcaaccattttgtcttttagggctggtctgatgtgcttcctgtatccgtgctgcaggcagcttttggtatttatctcgctcgtgctgttgcttgcgagcacgatgtggagcttgcttttcctggaagctcacatgccgattcgcttctggcatcgattacttcacgcgacggcgttgctgctgctctggagttgcctcgtaggatatctggagcacaaccagcacatttactcgattgttctgacgctcaagtgggggacgccgcgagtactgcagttcttgttgggtgtgtcgccgattttgtttggatacgctctcttcgggacgatctacttcggcaacaagattgaagagtttggcaccctgagcgcctccatgatcacgcttttctcgctcatgaatggagatatcatcatggacacgtttgacgccctggatctccatcacttcaacgtgtccgggaaggtgtacctgtactcgtttatctcgctgttcatgtacgtggtgctcaacatcttcatcgcgatcgtcgaagaagccttcttcgctacgcaatccacgcgccgccgacttcgtgacttgctctccgacccgcgggtatcacgtgtgaacgtggcgaaggagtcggatatatcggccgagatgatgcgggttctgctccaactcatggactcggattgagcttcttagataagcttgaaactcaatatattgttatttgctgcagagtttgtagagctaccgtgcggattcaaccatgaggtgagtcctagctgaatcctcgcggacaagtttattctccaagcacctcggtagcaagtttcgtgacgtcatcgtccacctgcacgacgtgcttgtgcagggactggcactgctcctgcagcgtggtgatgtggccgcgttggacgttcaggcacttgttgagtcgctcgatctcctcgctcgccgtgttgagcttcttctggtagtcgatgcgaagcttgtgcagctcctcgcttgtgcggtccgtaatctcctcgatcttggtcaatagcagcgccttatccgcctggtggatggacatgagcttctggatcgtgtcctcatgcgactgcaccttgcactcaagcgagtagagctggtccttgacgctgatgcggctgccggacacggacgtgttggagttgctaggcgacatgatccgcgacgacggtcggcgcatatcccgcgacggcgactgggcctgcatctcatcttcaatatcggcgaacatgcgctcgctttccatcgagatcttcatgttcttcatgctgctcgtgcctgacaaacgcgactccatggtagtagctggaacgctggactggaagcgaggctggaggaggtcgttaggctgacagtcgaaccgagcgcttgaaagcaaatagaagattgaattggtgcagcggctctaccgctcaacgagcaactcaactgcaacgcgcgccagtggatgccaagccgactcaacgccaattgaacagcaagcctccatctttagctcgagctaagaaaaagctcgcggcacatccaacaccgccctccgctattgtcggataagacaggtgagctccttgcgcagatttagccgcttgaaccaaccagacacgagtagttaggctccacttcaagaagcaagggaaaataaatacaccaggacgagatgcaaacatggccaacttcctggtgtcctcacctaaatagcgtgcgctccattgcccaatacttaaaactcgatcgatttcttgcgcgggaacggagccctctcgccggtttccatgtctgagtcaccgccctcgacggatagctcgctggagaaggaatcccccatgccactcgacagtgaatagctgctaagagaagggtaggcttggtcgtccgagtccgcgctatcctcttgctggcgggaggctgccagcaaggccgtgttgggcgtcatggtggtgtccacaccctgtgaatactcggacgatccgacggatcgagacgcgtcgctgatgggcgagaacacgcgctcctggtgctgcgtcacgatctcagtatccgtgagcgtgctgctcatggggttgcccgcgtacgtgtggtagctcccaccagagaagcccgatatctgggacgggttcgtgtcatgcgagcgcgtcgtgctcctcgccgcgctctcgcggttgctcgtagctgtccccgcctgactctcgcgcatcgcgacgggcagcatgttatccacgccgcccttgggctgcgagcgactgagctccagcgactgcaccacctcccggcggttgtcgcccagctgcggccggtgcttgaaccaattgtagaagaagaccagcagccccaccacgaacgcaatggcgaggccaatgagagcccattcccacgccttcagtccaccgccgccgctgccaccgtcgcttgctagctcaccagcaaagtccattgagcccgccgacattgagccagctcctaaatacgtcgaacttgaagctgaacagcacacagaagccgcgtgagtacgatgtcctagcagtccaacaagtcactagtagcatgccagcacagaaccttgagaacagttcgtcgcgtccgctacggcgttgcagtcgaaagtggcgctgctgttgatgcagacgccgtatacgttcttgtcgttctccagtcgccggcagctgcacgcggtctggcactcggccgagagactggaggagccacttgcagcgcacggcacgagcgcagagccttgctcgatgtaaagcgcgctggatggcagcgaacacactgcgagctcggaggcggcgccgccagcagcgagcgccagcgccgtgagggtccttcttgcaccgcgccgcattcgcgtcgtcactcctttcccttgcactgcaagaagctcgcaacagccgatgcaactgttggggcataccggttcaagcctgatatttcaccgcctgcggttacattccggtattgtgggtgaacggctcaccacgatgaaagttgtcgccgtgttctcggagtgaccacgcgtcaagaacgacgcgcataaatgttcgtgtgcgcatggaaagttacatgcattaggactgtatggtgaataaatatcacggatctgcctatgcatttgacgatactatagccaattggtttcgtttccagtactgaaacactgacattgacaccagggtcccaactcaacatgtaatgtaaaccagccatgactcaagcacaaatgggacctcaacacattggtgaacgcggaccaagggtccacacacacttgtcaatatatgcaaatttagaaacgagagcccaagcttcgtatttctacacgcaattccgaattttggagagcagtccccgacatttcagtcaagtacggcgactggggaaaatactagatctcaacggaccggtcaactaacgttacaaatagcgcgggagcgcgagctatgggtacagataccggtactgcaccggtcttgctcgatggtttcaccgtgtcaggcccaatctgacgaaggcagattgtgtggtggtgatcttcccaatccgatcggtttactcagcatcccaccagaacgcaattcgagccgtgcttcgcagtcgcttcttctcgccgcaaccgatccaccatggccgccgcactctgggctagttacaaggaatgggccgacgcccaggagacgctcttcctcgactgggcggacccgtcgggccagtacaagctctcgcccatgcaggatctgcccggcgccgacttcgccacggccttcgccatctgcgtcgcctacgtggccttcgtcgtgatcggcacggtgcgttgtttagtcgccctgattgagtaaaatctgggtggtgcagcactggactaacgatatcctctcttctgcctcctccagcttatcatgaaggcgggcgtcccggccatcaagaccagctcggtgcagttcctgtacaacccgctgcaggtcgtgctgtgctcctacatgtgcatggaggccggcattctcgcttaccgcaacgtacgtccgcttacctgtccgttcaaaaaaccccagcagcaacagcacggaactcacctttcatcctttgctgtggtggtaatattcagggctactcggccaccccgtgcaacgcgttcaacgctgagaagcccgtcatgggcaacgtaatgtacatgttctacctgtccaagatcctggacttctttgacacgatcttcatcatcctcggcaagaagtggaagcagctctcgttcctgcacgtctaccaccacctgaccatcttcgcggtaagacctccttcgtctctgtgccggcacccagccgacctatgtctaatgcgctccttgccccgcagatctacttcatgaacttccgcgtggcctacgacggtgacatctacgccacgatcatcctgaacggcttcatccacaccatcatgtacatgtactacttcgtgagcgcccacacgcgtgacatctggtggaagaagtacctcacggccatgcagttgatccagttcgtcaccatgaacgtgcagggctacctcatggtgtcgcgctcgtgcgagaacttcccgcacaaggtgccggtcatctacctcgtctacatccagtcgctcttctggttgttcatgaacttcttcgtcaagtcgtactgcgccaagccgcgcaagtcgtccaacaagaagaagacgcaatagagagggaaggccaccgatcctctgctcgttggtggtgacagccaccaggttttgcgtccgcgtgccttcggtcagcggaggctgctacagttagtcaggctgctgttttgtcgcgtgcgagcgttttgggaccaatacaacacccgtgggagtgggaagctgctcctgcggcttttatccaaacctttagaacgtgtcgtttcatgtgtcgtttcatgtgtggtggtccttgcatccttaggattccttactgacctgaaagttgtaactccgttacagcaacggagttatgtgaatgcctggcagcgtgctttcacactgcgcccttggcgagcggccttgcgttcgcggcctcggctttgcatcgagctctgattaatgccgttagttttcttgtgcgatagattgtggcagaagttttcgactgcagagcgcgcctcggacgtggaaatggcgcattgtcagcacccgagcacgggcgcctgctgtggctagccccaccgtcggtacagtgatgaaagtgtgacgaggtcgctgcgcttgagtcagcgagcgcgctgtggcgggtgcacagcgcgaagcggtctcaattccctctcgaagctgatataggcgcttgctgtagtcgccccccgtggcgtttatgtctgcctcgctggggacccaagtacgtggcgagcgccgcctcgcagtctccaggctcgggctccaggctcggagcactcgaagcagcgtgcttggatacaacatggatacaccgagtgtccgtaacggatcccgtaacggccgctggatggtccatgtgcattccaagcggacacctcacagccaatcagacgctgccaccaccctagtggaacagagcaccgcgcaaggcaacctgtcctgacgaggaggccaccgccggcttcgcttgcacgcctcggcggcggggcctttccagagcaatcgagcacgagcgcgcaccaaatttgaactttgcagagaatcgcgccggcggcggcggcacggcaggcagttcgttcgtttgcactgcacgacctcgacaagaggagtgcaggcttgctttgccagacccacggccgagctgatcgcggcggcggatgcagcaattcattgcaattatgtaagcacccgcatgccaggctgcagggctttcgcttcggcctcggccttccttttagccggacaaacgcagccgctggagcgcacgcttcgctgctcgcgcggcgaggaccccgaccgcgagtacagagatcgccagttagtttgtatccatcctgccggctgttccggtttaaacttgcatagcgcggcccgaacaccccgacacttgatgcgcggcgcacacgagcgatccctctgcgctgagtgtcactcagtgagtgaatccgagcggcgcggcgccggcgctgaaccctgtggattcattcctccagtgcgacacgctgctgctgccgcgccgcagctcgtccgctcgcagggttgcagtgatacccaagcttacaccatcaatacgcctcctgaaggttgcgctccgccacagcggtctccgctacatgtacaagacttctgctgctgctgcttggactgcagcctacgtgctcggtaacgtccgtacggtacagtatgacgccgtggtcccattccccgcgaccaccccagtgcactgatcacgccgagcccgagcaccacgctgctctcgccgccgtgtcagacttgatgttgagcaaaagcggcctcggtctccccccggctatgatctccaaatggatcggctacgtccaaaaccctttgactataaataccctaccgtatccgattggatgcggtgctactgcgaagtatacgaaatctcaagtaaaagggcggacgaaatcaggcgctacctgcgagaactgatcctcttgacacgccggacgcgcgccattcgtgcgccggaccccacccgtggcgctcactttcccttttggtgcccggcagctcgcactccgcctccccgcaagaccctagcagcagcagcagcagcagaagcagcacgatggccagcgcactcctcgagagctacaagcagtgggccgacggcatggacgtcatgctcatggactgggtggaccccaccctgcgctaccgccagtcgcccatgcaggactacttcctggccgacttcgccacggtcttcgcgctctgcgtcggctacctcaccttcgtggtggtgggcacggtacgatcctactcctcctactctatttccgtatagcgagcgccctaatgcacgaatactgacgacggccctccgcttttgctgcattccacgcctcccacagctcgtcatgaagtcgggcatgcctgcgctcaacacggccccgcttcagttcatctacaaccccatccaagtcgtgctgtgctcgtacatgaccgtcgaggccatcctgcaggcccgccgcaacgtacgtgacccttttcgagggatcttccccttgccccgtcccgccagctgacctggggccgtctgttttcattcacccttgcaggactactcggccaccccgtgcaatgccttcaaccacgagaaccccgtcatgggcaacctcatgtacatcttctacctgtccaaggtgctcgacttctgcgacaccttcttcatcgtcatgggcaagaagtggaagcagctctcggtgctccacgtgtaccaccacgtcaccgtgttcttcgtaagtctttctttgctctgctctccgaggccttccaaaccacccgtactgacaaggatgcatgtttttgttgttgttagtgctactgggccaacttccgcacgtcctacgacggcgacctctacgtgaccatcgtgctcaacggcggcgtgcacgccatcatgtacatgtactacttcgtgagctcgcacacgcgccagatttggtggaagccgtacctgaccacggtccagatgatccagttcctgctcatgaacgcgcagggctacctcatggtctcgcgctcgtgccccggcatgccgtacaagatctcggtcatgtacctcatctacgtgcagtcgctcttctggctcttcatgaacttcttcgtcgtcaactactgcctgagctcgcgcaagacccccaaggccgtcgaggccgacaaggagaagaagacgctgtaaatgagttgctgagtcgatcccgtcggtggaaggagcaagcaagcgagcggctgggcgcgcagagcgggcgtggcaccaggtgtcatggcagcggagacgctgcccgccactggctggcccaagtgtatcttcttattgccaacgtagggtctcccttccaccataatggcaacactaatactactacgacagttcctgaacatgcgggctccctctcctcgcgggccgtacggatagagcgctccattccggccgtggtggccattggcctcgggcaaccagatcctgcttgagctatgtgacgtagtgcagccatgggaagaaaaaggacaacgaacggagcgcgacaaaggcgtcatcatgcccgcagattgcgatcgtcgagcaggacaacaatggtgggcagcctccaagtgttgcagtctcaaagttgcggagcctgctggaagaccaccgctactctttggggacgaagtggtgggtcgagggtcacacggcgcaggcatcgctgccattgtggagaaggaaattttcgagggcgagcttggagcagctctgcaccgagagtaaacgagccgtacagtccggctgtatcatcatggcttcggtgagactcaaggatatctgcaagaacacctcgacgttgcagctgaactggaagcacttagctcctgcggcgaacaacagggcgagcttactggcaatgcggtgtgctgctcaacacttttcggcgagacggatcatacagtacaggagccggcatttcagatcgtggcgctgataacgaactccacgcacatggcattcatctgtaacgatggtgcgcgcgaggacgatgctcacgataccaagaatcgtcatcggcttgggcggagcgcgttggaagcgcgtgtggaagcgtgaactttggatcgacgacgcgcaagaaggacgggttctggagccatttggtcggagtacttgtgttgggctaccatcgcgagcccgtactttggagcaatgatccgtgctcgacgctgatcgtgtgtgcttactaaccactggctagccaatttcagctttgaagctcgacataccgtggagaatcgatggtgactatcgagatgaacacagcgtcgatcccaggaagtggtttgtactgaaggcgatactcagtgctttgcggtgtctcttgtccatcggtatcggagatcgcgctcgatcggtaaaggaaatcttgttgtgagcttcgcttttgctacttttcagcggtcggtcgattacctaccgtatgtacacggctctccatccttctgaccggaaactttaagctcaatcaagcacattcagccactcgctgtcgtccactgattccaaggtcactgcggcaccgaccacacgccaccacagcgactacgaccgattcacccgccacacttgaataaacggtaggtcgctcaatactaagtagtgctgaacatgaaggaactcgaccatcggctcctcaaatataagtaatacatgtagtgcacgctactttttaaaacgttaacctggttgcaggccaccgccaccgccggtgaagctcctcggcggctgagaggcaatccatctgattgcaccaggaagttgctgcttttgctgttggctcggcgggtgtgaagggcaaattttcacaaaagtatctattctactcgtgcacgaggccttcagtccaatattattcgttggtatcgaaccggttgacaggcgaagaggggaagaggtcaatgcgttaaacctgaaacaggcgaaacaagtgatatctaaaacattaagtataacttatggctaccccatcgacgtctcctctttcagggcatgcgcccctgcccatgagagcccctcctcagcgaatctgttcatctccacgggtgtgatccgagacgtcttcggtgtcgggttcacgctcgtaacacctccgttccgacttggttctaggaaccatttcacggtttgcaagtgggcgtgggctcccgctgcacagtgaacggcaacgaaatggtgcatccgtataccgctgggttggttgccgccggaagtgacaactgtttggagcttcttagtgaagaacgagccgaactgttgacgattgccaaaggcctctagctgtcgagcgatctgtggactcgcacaatggtacagtaccgagtcgagacctctagtgctccacttggctacgaaagctcgtccgctggcgtctcgcacggaaggttcttgccataacaccttcgtcgaccgttgctttagcacactgcgcagtctcgaggtgtgattcaatacaacgtgcacgagtagaaaccccagggaaatgatgacagccacgagcgagccgccacttatcgcgtagagatgagggtccgagtgcagctccgcgtcccgaaagacaaggtcagctcccgccttgcacgaaaagtggatcaccagcaccgcagccgcattcagcgaccagaagcgcacgaaatcattctgcgcagcatgatcgaggcgcattgccagtgatcgcgtctgcagcgtgacccgaatgacccaatagctgctgctcagagtggtgaggacaagcgagaggctgcgcattggaatggatggcacgcagtagatgacgatcgtcccttcttctgtagagagctgggctgtacaactgagcgagaaaatgttgctgagagtgcctatcgcgccgagatacagcaaaaccatcgtacccgggtgtccaagagctccgtcagctgggtcacactggagcaactcgaagattccgatacgtagcagtggcgcttcacgtttgataaagtctgtgcttccaatacgggtaagagacagcgcctcccctgcaggtcgatacacgctgttccgtatgaagatccacacactcttgaggatgaagatgtactcgatcgcatagtgcgaagcaccgatcaagttgagaatcagcaggaacgtgcggatctgccgactcgtattgtcttggattcgaattcgtcgagtcaacattgtggtatcaatcataaaccactcgatctggcgcaagttatcttgctcgaccacctggtcttctatgctggcgtcggcagtgatgaaggacgagcaggaaggaagctcaatcaaacttccgttgagcgtgcggaatagtacctcctccgaagtcatgaacagtctgcacaaagtgtgtaagtccgtctcctgggaatctcggaattggcagctaccgaatccgtcacctatgtaagcttggtacttttgtacattccggccgctctgctgcatgaccgaatcgacgatcgtttggcaatctggagtatagaggtagccatacggggtagttggtgtttcggagtctgtaacattgacgcgagattttgcccactttgtgccgtccattgacagcaatgcagagtccgtaagtacctctggaatgtccaaagctgtataatccgtcgcagattcgcgtcgtcgccccagtgtgtaggtggtagtgttgtctagctcggaataatcgcgctcgtccttctggaacagaaacatcaagttcacagcgagagtcgggatgatcgaggccatgtcgcccccacactgcttgatcttcgctccatcaacgtcagccacagtgatcgatttactcattgtcgtgtgctggatcgcacagttccagaacggagccaagtgcatcgtagacaccaagtgcatcccgaccgtgttgatcagaaagtctggcgtaaagaatgacgctgtggcatgcgtaacctcggcaaaaattgcggcttctccattcacgttgaccccaacggagagttgttgcgagtccagataatacgctagaagagcgtcgacgcctagtacgtcaacgagtgcgacgtgatcaccatcaaatgacctgggtagcagccttacgacatcagctactgatatcccttcgctatacagctccacaattgcgtctgcaacgctgtccgtgtactcgggtagctccaaagcgataaacccttcctgcgcatttttcatgattttgcggacgacgtgcacgtcgtcaaagtggcgtaaatacagttcggacatgttgacgacggcgataaggccaagcgtgacattgccgacctctttcaagtgctcgtcgattggcgctttgtcgcggtggttgaagaagcgatcgcgcggaaacttgtcgtggaaatctcgacagaattcgtgttgaatcgaagggaaccagtttccaaagagcaactgtggctgggtctcccaggacgataaagaggctgtcacgggtccacacaaaggcgcgtacacgtctaccataatgttaacgggtactgtcagtatctccgcgggaaggctgtcgattaaatcggatcgacgcaagttcgatcgaactaggaagtcgcttagtgagagtgtggctgcgtctgtgcgggtgagcttcttcttggtcttgagatcgatcagcgggaggttcttgcggtcaaacgtgtcaaagtaatgcacaccactggtgacaacacccacgctcttgagcttgcgcgcgacgacctcatcgcggacttcgtcgagcgacttggtgacgtagctgccaacgtagtattccttgagcggggtcatgcttatcccgacgagggcaaacacgaagatagcgacgcatgttctgtatgaaacttcgtagtcatggaatactgtttgctgcgttcttggtttctttgcgccgccctcgtcctttggaagtgggctcgttcctcggctgatgcccgtctttcttgtcatcacaggttgtgttgtctgttgttcgctgtgcagtattgaattcgggttacggcgcggactttgagtgggaagcaaggtcctcttgggataaggatattcaacacacccgaattggaatgttgggctcaattaaaaagcttgcattcatgactcaacaccataattagctaccagtcgctgctgtcacagtggattgaatgatccaccgtaacgcgagcattgcaccggactgccacggttctttcatggtttatcctcgttttactgctctgataacactagctcattgagcagctcttcatcttctgtcgccgttgttggttgttgtcctgtgcttcggcaacagcaaccagcagcttcctggcgtccgtgcagcgaaaaacttgccagctgttgcactgcgatccggcatgtgcatgcgcgaccacagggccgcgtgtcatcgccactcgccggtgacgcacaccgggacggtctccacacccgcagcagcaacttgtcggcggcaacaggtccccatggcaaggcgggatatggcccgatggggaacaagtccaccgctcgaggcagcgcccggatgcgcagcattggaaggccacctcgaagtggcggccaagcgggcagcagatgcacatgctggcaaccctggccgcgaccgcattgtcgacccgcaggggtaagacgaatcttagtccaagatacgctgtcaaaccaggcgcccgcttgtccggcgttgcaggacgctcgctgcctgctgatgctgccaacgctgcttggcgtcgagactcgactcgcgtgctgagccgcacgcgcctttcacgccgttgccaccgttgctgctgctgtagtgtcggcgaaggcgcctctcctatatagcgccggccttcgccatggcccattgatcggcccgcaggctggcggcggtgctcgctccttgctgccattcatgccgctggcgctcgcggcgcgtcatgagcctcgttcacgattggcatgtgcggacagtgggacggcgacaagcgcccggattggtggaattgcgggccgcagcggcttattttgggctccaacgcggtgacgcgccttcttttgggcgccctgtcacgccgcaggtacttccttcatctcactgcaggaaaagcggaagaaggaaggccaaaagcgcggcttcaatcacgccgcccagtctgcttctggccgcgcacagcagggagcgccatcgcactgccgccctcgcctcgccctcccgaccccgaggcgagcgctgccgcgaactgatacgcagcacgtacagccacagtagggccgttgccaccgccgccgccagtctcattcatggccctgacgatgcagacggaggtgaacccggcgagctgggcgtcgccgcccgcgtcgccctcgccgctgtcgctgcgggccacgccggcgtctccgcaggtgctgcgcgcctcggcgtctagtacaacgcgcctgtcgcccagcagcagcagcacccccaaacagcagcaactacagcagcagaggaggaggcggagcaagaacaaggccagcgagccggccaacagcgcgctcgtgctggtgggcatgatcttcttcggcgtgctgctggcgctgctggtcatggccttcttcgcctacgcgccgctgctgtgcgcgtcgtggctcggcatcctctacgtcatcgggctgtacctgtcgaccgagtccaagtggcgctggcacgacgcgcaggagttcgagaaccgcttctggacgggcacggccttcctcttcagcgcggccgtgctctacatcaaggactcgccgctggccgtgggccagtggaactcgacgctcgggctcgtgctcgtcttcggcttcaccatgagcgtgcacttcttcgaccggttcctgcaccggcaggagatcagccggcggccgcggctcaaggaggccacgcgccaattctcgcataatttattcaagtacaaggccacggccgaggagaagacgctgctcgtcatggactgcgtcaactgcatcgaccgccactatttaccgagcactattaacaacatgatcaacctggccgaggtcaagcggcgagagctcaagatcttccgcatcctggccggtgcgggcaaggacgagctcaactacatcctgaaccacatccggctcgcgctgctcttctacaaggtcaaggaccactcgaagctgcgcgaggaccagagccgcacgctgatcctcgacttgctgtgcacgacgcggctggccgacctgtccgtcatgtcccgcgcgctgctgctggacgcgctcatggtgatgaagatcagcgcgcacccgatggcgcaaaagtgggtgcgcaacatcattttgaagacgcagggcgatgacttgagcaacttgaagacgtacacggacgccaagggggacttccacagcatgcacaagctcgtatttaacgacgtccgcgacccgaccatccgcgcggacattttgacgcacatccagcgcgaagcaagtgtgcagatcgcgcacatgcgcctcggcacgaagcgcggccggaaccgcaaacagcaagcgtggcgcaaggtgttgagcgacgtggacgacacgctgtactcttcaggtggacggtatccggcaggcttggacacgcggtaccctcgacacacgctgtaccctggcgtgctgccattctatcgcgagctggacatgggcaccgttggcccagacgactggacagacgaccgtgtgggcaacctcgtgttcctctcggccaggccccacgtgtacaaggatgtttccgagaagaaatcgtacgccaagtttgctgcactgcatgagaagatgggcatgcacactctgcccacgatgctcgcaggcaacctcaagtcgggccgtgcctttatgtggcaaggcgatctggagcctatggcccagaagaagttcgagaactttagcgagttctaccagctctacccggagttcaagcatatttttgtcggtgacaacggccagggcgatgtacgcgccgctgagcttatcgtggagaagtttggctcggatgcattggaggctgcgtttttccagcgcgtgcagccaatggagaagatgttcaactaccattcgaaggaggacttggagcgttggcgcaagatgaacatcatctttttcgatacgtacgtcggcgcggcagtcgaggctttccgaatgaagaagattcggctcagtggactcaagaaagtatgcgacgatgctggacagtcgtttgaggcgattcactcgtggctcacgccacaaagccgggaacgagcacgactgcttcttaacagggatctcgcagcggcaaatgtgctactggctaagaagcttgggccttcacctttggtgatgaaacctcagggactgccactaaactcgattgtgcgcacgccgctggggcggggtatcgttcgttctttccgtggcattgatggcatttaccaggtggatctgaccgactggccgccatcgacaggtaatcataaacgagtgcgagcgtttttcccggaagacagcctcacggtgtacgtcagtaccgacatctcgcccctctctgacagctcgctggaatacctcaagttctaccgcgcgccaccagcccacatcttcgcgccacacgcgctggtgaaaacactgtttggcatcggtcgcgttcaaagttaccgcgccgaagatgagatctatacggtaacgattcctggggaccagagcatgctgcacatgaccgctttcctgaatgccgattcgctgcaagctgtggatgaggaattcctcaagggttacgccaccagcggctcgacgtcgccgcggatgttcgccggagtgcgctctggtatcggcttcatcacgaagaagcttattacgtttgtgcctggtggctctgcggcgaagccgttgttcggcattacggtggttgtggattctccctttggtcgcggcgtggttgttaactttcgggaagaagaccgcgtttacgagctgcggttgtttgctagcggaactaaaacccggggtcgtgagctgccgtcacacgtcagcgtgtttgtccaagagcggtgcttgcagctttcgccggtgtctccaccacgaagcttcttctcgatgctcgggctgggctacagtgcagctgagaatgcgatcgagcaaccagcaggaccggtcccggttggctctcgtgtcagcaccgcctacggaaagggtatcgtccgtagctaccgctcagtggaccatgtgtatgaagtggtgttaactgactggacgttacctggtgatcacggcgtggtcgcatatctgacgaaatactttatccacgtggaggatccggcgttagacgacgttccagcacttccgctcgcggaaaaggaggtgtcatcggaggtcaaaacttctgcgccgccgggcagcggcggcatcttccagttacttcgttatgggttctcgacgcccgcttctgaagcttctgaagcaaccgcgccgagcaggatgcccgcagccacggagaatgctatagcaacagcagagccggtcccggttggctctcgtgtcagcaccgcctacggaaagggtatcgtccgtagctaccgctcagtggaccatgtgtatgaagtggtgttaactgactggacgttacctggtgatcacggcgtggtcgcatatctgacgaaatactttatccacgtggaggatccggcgttagacgacgttccagcacttccgctcgcggaaaaggaggtgtcatcggaggtcaaaacttctgcgccgccgggcagcggcggcatcttccagttacttcgttatgggttctcgacgcctgcttctgaagcttctgaagcagttgtgccgagtacgccgtccgcagcgacggagttggaccaaccagagatgccagagtagctcgtcacctaagtgttgcgctacgccgtgatgacggggagaatatttttatctgtttgctaatttactggttcatctgtcgcgggcaaatcagcggaaaatctgttgcccgtgtcggtttatctgttgcgtggtgtagggacgaaagcaacaggttttcggtacggaaatcctgcaacagattacatgtcgagttgactcggtatatctgttgcctatgtgattacttgttgtgctcatgcatcgcgtaagagcacccccgctattgctcaggaaggtgatgcatgaacttgtggtattccatttcggggactatggcgagctcagcggtctgctacggatttattctgcgatagtcattccttaactttgcaagcagcttgagttattgctgcatgcagatgatagcttgccgttccccttagaggccaacgaggactgtgacttctggcgcaggcgtgctacgacatcagcagcacaggtatggcaagtcaacgtcgccacgggtgcgctcttgacgtccaagcctatcacaaagagtgtgtgacctattttaaagcgcatgcaagctactggactaattggtgccagggatgagttacagcttcttcagtgtttccaaggatttaacagcagaccacgcgcttacgggtcgatccacgaggtgaaggatcactgcggtgagcgtcacgttgtcctcctagtcattgtgtgagtcataacgatcagtttcctcatgcgtccatctcacaggcgtaaggggggcaaatgaatatattttgcctcgacttgaattcgagggcgtggcgaggcgggttcagcacctcaaggaagaattcaaagtgagatctagactgcggcattcgccggctccccactaatagcaacatcagccttaggttcttaccgcctatcggaaaactagtcatcctcacggactgaccctcaagcggtcataacgacccccatagccatcatcacaggaagaacggccttggtcgtaagagcggtagccctgagggtcgaatttgtcatagccatagccccaattgtagtaatgagagccgttgtgtccgtggtagccccgatcgcgcgcgtacttaagtatgcgtgaagtcatcggacggaggtgtcgactcacgtccgctgggtagtacgatgtagtgcacgtggccactgagagtgacattaacggaacaatgcattaacacgagcatccgtcggccacgccgacaacagcttcggagctgcgagtggctacagtaccgtagatgtcaccgctgcccttcgtctaagttacggggttgcactatgtagttcactccagtctgcgggactttaggatctgctctcgtcatccactgtcgctctcgatctccatactctctttatccgcatagatatttgtttgagctaaaactcatattacagcgccaaacggttgagtatgcttgctactggactgcaggcagcatccaggagaccggctccatgatcactaggttcgatgaggaagcgaagtacgacttgtactaccgagtacttcggcgtgtttggagcgtgggcacaacagactgtggcgactcgtactcatggactggacttcttcctccgggtgcttcctgaggtagtagagtgcaaagctaccccctcgtgcgaagagcgtgggcactagacagtgagtccttcagtactatgtattcgcgacgtgtacaagctcgcacaggggcaaatgccttggcggctacataacaacgagcgaagaagagctattggagaccacgcaactattatttatcttagtcacatgcacaggtaagcaagctcatctcgcgttcatgtgtacaggtgaacgtggcccaaccatctaaatcaagatccagcgcaatccaaacttggcctagtccgaggcggatcacaagtccgcgcccgaagaggggttgcctgcaccagagcaacagtaattcgagtaagaagcagtgcatgtagagcgaggcgcaatagatccgatgcctgaagacgttgaggtgatgcgggactgtacaggagccgacgccagacgcggaaaatgtgcagcgtagcatcttttggagctggaggacggtgttatgaccttcaagtaataaatctactgctatggccatcctactttcacatagccttcgcgaaattcatgcgagccctttaaaagaatcctatcaagcatcgaccgccttcggataaatagcaggggtgctcttactcgatgcataagcacaacaagtaatcacataggcaacagatataccgagtcaactcgacatgtaatctgttgcaggatttccgtaccgaaaacctgttgctttcgtcccctacaccacgcaacagataaaccgacacgggcaacagattttccgctgatttgcccgcaacagatgaaccagtaaattagcaacagataataattactccccgtgatgacgggaaactcagatgaatgggataaatgagttgtttttgatcgaaattgtaattgattctcaatagaaagtttgttaatgcatgatgatcctgcgaccagggagcggttagctctttcctgtcggtacctggcatcttcgcagaaaaatgtgaatgaattgtctaggacgagttcgagctgtgcagggtctgcttctcttgacttcagtacgagctacctcgaagtatgctagcagcgactagttaatactccccgtacatgaacttcatgccacttcatgccatgaagtagtggtcgctggcagcaagaactcacaataatggataagtaagaaagtatggctactggtattcttgagcgagttccgtgtgcaaagtgctttccgaggctaagcgtttctaacgatatctacagtgtacatgtacgcaggcgggcagactaacccaacccaagcctactactactactgaagaaatatgaaatgtttttgcagctctacacggttgatgcacattcggcatacttgaagtggttttcttgaagtgtggcttgtcatgttagaaaagctggtttaaaaggggttgaaaaggttctgggccggtcatgcataaaagctcaccggacgaacttgaatttgatcattcccaaatttctcgctgttaagttaggttgtgacgcaggaaaagtacgttctcgcggctgctattgaaacgaaaactgtgttggagtttcccggcatcacagcgtagcgcaacactgaggtgacgagctactctggcatctctggttggtccaactccgtcgctgcggacggcttactcggcacaactgcttcagaagcttcagaagcaggcgtcgagaacccataacgaagtaactggaagatgccgccgctgcccggcggcgcagaagttttgacctccgatgacacctccttttccgcgagcggaagtgctggaacgtcgtctaacgccggatcctccacgtggataaagtatttcgtcagatatgcgaccacgccgtgatcaccaggtaacgtccagtcagttaacaccacttcatacacatggtccactgagcggtagctacggacgataccctttccgtaggcggtgctgacacgagagccaaccgggaccggctctgctgttgctatagcattctccgtggctgcgggcatcctgctcggcgcggttgcttcagaagcttcagaagcgggcgtcgagaacccataacgaagtaactggaagatgccgccgctgcccggcggcgcagaagttttgacctccgatgacacctccttttccgcgagcggaagtgctggaacgtcgtctaacgccggatcctccacgtggataaagtatttcgtcagatatgcgaccacgccgtgatcaccaggtaacgtccagtcagttaacaccacttcatacacatggtccactgagcggtagctacggacgataccctttccgtaggcggtgctgacacgagagccaaccgggaccggtcctgctggttgctcgatcgcattctcagctgcactgtagcccagcccgagcatcgagaagaagcttcgtggtggagacaccggcgaaagctgcaagcaccgctcttggacaaacacgctgacgtgtgacggcagctcacgaccccgggttttagttccgctagcaaacaaccgcagctcgtaaacgcggtcttcttcccgaaagttaacaaccacgccgcgaccaaagggagaatccacaaccaccgtaatgccgaacaacggcttcgccgcagagccaccaggcacaaacgtaataagcttcttcgtgatgaagccgataccagagcgcactccggcgaacatccgcggcgacgtcgagccgctggtggcgtaacccttgaggaattcctcatccacagcttgcagcgaatcggcattcaggaaagcggtcatgtgcagcatgctctggtccccaggaatcgttaccgtatagatctcatcttcggcgcggtaactttgaacgcgaccgatgccaaacagtgttttcaccagcgcgtgtggcgcgaagatgtgggctggtggcgcgcggtagaacttgaggtattccagcgagctgtcagagaggggcgagatgtcggtactgacgtacaccgtgaggctgtcttccgggaaaaacgctcgcactcgtttatgattacctgtcgatggcggccagtcggtcagatccacctggtaaatgccatcaatgccacggaaagaacgaacgataccccgccccagcggcgtgcgcacaatcgagtttagtggcagtccctgaggtttcatcaccaaaggtgaaggcccaagcttcttagccagtagcacatttgccgctgcgagatccctgttaagaagcagtcgtgctcgttcccggctttgtggcgtgagccacgagtgaatcgcctcaaacgactgtccagcatcgtcgcatactttcttgagtccactgagccgaatcttcttcattcggaaagcctcgactgccgcgccgacgtacgtatcgaaaaagatgatgttcatcttgcgccaacgctccaagtcctccttcgaatggtagttgaacatcttctccattggctgcacgcgctggaaaaacgcagcctccaatgcatccgagccaaacttctccacgataagctcagcggcgcgtacatcgccctggccgttgtcaccgacaaaaatatgcttgaactccgggtagagctggtagaactcgctaaagttctcgaacttcttctgggccataggctccagatcgccttgccacataaaggcacggcccgacttgaggttgcctgcgagcatcgtgggcagagtgtgcatgcccatcttctcatgcagtgcagcaaacttggcgtacgatttcttctcggaaacatccttgtacacgtggggcctggccgagaggaacacgaggttgcccacacggtcgtctgtccagtcgtctgggccaacggtgcccatgtccagctcgcgatagaatggcagcacgccagggtacagcgtgtgtcgagggtaccgcgtgtccaagcctgccggataccgtccacctgaagagtacagcgtgtcgtccacgtcgctcaacaccttgcgccacgcttgctgtttgcggttccggccgcgcttcgtgccgaggcgcatgtgcgcgatctgcacacttgcttcgcgctggatgtgcgtcaaaatgtccgcgcggatggtcgggtcgcggacgtcgttaaatacgagcttgtgcatgctgtggaagtcccccttggcgtccgtgtacgtcttcaagttgctcaagtcatcgccctgcgtcttcaaaatgatgttgcgcacccacttttgcgccatcgggtgcgcgctgatcttcatcaccatgagcgcgtccagcagcagcgcgcgggacatgacggacaggtcggccagccgcgtcgtgcacagcaagtcgaggatcagcgtgcggctctggtcctcgcgcagcttcgagtggtccttgaccttgtagaagagcagcgcgagccggatgtggttcaggatgtagttgagctcgtccttgcccgcaccggccaggatgcggaagatcttgagctctcgccgcttgacctcggccaggttgatcatgttgttaatagtgctcggtaaatagtggcggtcgatgcagttgacgcagtccatgacgagcagcgtcttctcctcggccgtggccttgtacttgaataaattatgcgagaattggcgcgtggcctccttgagccgcggccgccggctgatctcctgccggtgcaggaaccggtcgaagaagtgcacgctcatggtgaagccgaagacgagcacgagcccgagcgtcgagttccactggcccacggccagcggcgagtccttgatgtagagcacggccgcgctgaagaggaaggccgtgcccgtccagaagcggttctcgaactcctgcgcgtcgtgccagcgccacttggactcggtcgacaggtacagcccgatgacgtagaggatgccgagccacgacgcgcacagcagcggcgcgtaggcgaagaaggccatgaccagcagcgccagcagcacgccgaagaagatcatgcccaccagcacgagcgcgctgttggccggctcgctggccttgttcttgctccgcctcctcctctgctgctgtagttgctgctgtttgggggtgctgctgctgctgggcgacaggcgcgttgtactagacgccgaggcgcgcagcacctgcggagacgccggcgtggcccgcagcgacagcggcgagggcgacgcgggcggcgacgcccagctcgccgggttcacctccgtctgcatcgtcagggccatgaatgagactggcggcggcggtggcaacggccctactgtggctgtacgtgctgcgtatcagttcgcggcagcgctcgcctcggggtcgggagggcgaggcgagggcggcagtgcgatggcgctccctgctgtgcgcggccagaagcagactgggcggcgtgattgaagccgcgcttttggccttccttcttccgcttttcctgcagtgagatgaaggaagtacctgcggcgtgacagggcgcccaaaagaaggcgcgtcaccgcgttggagcccaaaataagccgctgcggcccgcaattccaccaatccgggcgcttgtcgccgtcccactgtccgcacatgccaatcgtgaacgaggctcatgacgcgccgcgagcgccggcggcatggatggcagcaaggagcgagcaccgccgccagcctgcgggccgatcaatgggccatggcgaaggccggcgctatataggagaggcgccttcgccgacactacagcagcagcaacggtggcaacggcgtgaaaggcgcgtgcggctcagcacgcgagtcgagtcgagtcgagtcgagtcgagtctcgacgccaagcagcgttggcagcatcagcaggcagcgagcgtcctgcaacgccggacaagcgggcgcctggtttgacagcgtatcttggactaagattcgtcttacccctgcgggtcgacaatgcggtcgcggccagggttgccagcatgagcatctgctgcccgcttggccgccacttcgaggtggccttccaatgctgcgcatccgggcgctgcctcgagcggtggacttgttccccatcgggccatatcccgacctgttgccgccgacaagttgctgctgcgggtgtggagaccgtcccggtgtgcgtcaccggcgagtggcgatgacacgctggccagctaaaacttcacacgacgaaagaaggcaaacgctgctcaggtcatcttggcttcttacgcctcagactagggaaagatctaggtaacggatggctaaacaccctcaggccaggggtggagctgcgtaaaagtctcagttcctgctcgcgtgtacacggccttcaatccaatactattcgttggtatcgaaagtgtaccaaacatgctgtttctcttggacgcatttggcttacaggatcatcttaagcgggtcctcgaccagctccttgaaggacgccagccactgcgcgccgacggcgccgtcaatgacgcggtggtcgcaagcaagcgtggcggtcatcacctgcgcgtacttataaatctgctcagcgttggggtcgtcgttcggcaccaccttcttctcgatcgtgcccaggcccagcaggcacgcctgctccgggcgcacgatgccagccagcgactgcacgtcgaactggcccacgttcgagatcgtgaacgtgccgttggcgaggtcggcgggctcgaaggcgccgtcgttggccttggccacggcagcctggatctccttgctaatgtcgtcgaggcccttgcggttcacctgggtcagcacgggcgccacgacgccaccagcagccgaagacaccatcaggttcacgttcacgtcgttgaactgacggatgaacgagcccttccagctcgagttggcgtccggcaccttgcgcatggcaagcgaggcggcgcgcacgatgaagtcgttcacggacagctgctcgtcctcgctgcggccggcgttcaggcgagcgcgcgcgtcgagaagcttgtcgagcgtcaggttcgtggacaggtggtagtggggcacctccagcttctgctgcgtgaactgctgggcgatggcctgcgcctccgggctgatcgggtagtccgtgtagtcggcggtggcggtcggggcagcggcggcgggagcagcggcagcagcaggggcggcagtctcctcagccggggccggggcagccgtgccggcggccagagcggcgtccacgtcggccttgatgatacggccattcgggccagagccgttgatcaccgacagcacagcgccagactcgcgcgcgaccttcttggccagcgggctggcgaacacgcggcccgaagcgggggccgaggcagcgggagcagccggagcagcgggggccggggcagcagcagcagcagccggggcggcctcaacagcgggcgtggccggagcggcctccacggcgggggcggcgtcggccgagaagttcttgaaggcggcgacgtcctcctcctccatcacggtgacgaagatgggctggcccacggggacctcgcccgagccggcctgcaccaggatcttggccaggtacgagtcgtccgtggcctcgtagtccacgacggccttgtccgtctccacctcgcacacgacgtcgccggccgagatgaggtcgccctcctgcttgttccacttggcgatggtgcccacctccatggtgggggacagggccggcagacccacgacctcgtggtcgggcagcgagctgaaggcgcgcgcagacatggccgctgaggcctcacggcgcgccgcggcgctggcgtggtgcgcgtcgaagacagccacacgctgccacacgttcttgttgcggagggcagtctgccgggcacacacacacacacgagaaggcaatcacttagtcacagagctcattcattcgttcatggcgggccgcgctctttggtgggaggcgcacgcacctggaagcgctgcatggtcgatcacctatctacaatggggcccctgttgagttgtgacgccaaactccaagcagaaatggtgggtgtctcccccagcgccacgagtggtccactcagagaggatcggcgcccacatacaaacgccaagtgccgccccccgcttttgtcgcgtacccaacaacagcaccggcgcattggatgaaagtgggtggagttttggccaattgtgcggaccgagcgggctttgaggcacatctgtgcttcatgcgtgtctctactcgctcaaagcgagatttgctgcttggaggccaactttgccgacggcaaattgccggtttcggcacggaaattgttcccgaattgcttcgtgtatgctacctaatacaagcgcgtggtcgaatccatggccgtgcttgtcgacctgcaacgtctgcggcgagatgtccagggttccgttgagaggcggcccagaataaggccgcgaacctgtttacgcggcgcgcaatgcgcgctgccagcacagaaacccacgatgaactacactacaactactagtacgtacagtatttggaatcacccacttgctgttaacatgtcaaaatgtctaaaaagcaagtggttgattttgatacattttagcagcggctcaagtgttttcattcattgtcaaaaggactattgactacttcccatttcgatgaagcagtattgcacgtaactccggaaattacagaattataccccgttcactataaaataatgctaggaacttgatttcagcacagcgtaccacaattttcgcccagatgggtcactaggacaaattatggcaccactaatattaatgtattcttcgaagtaccacataaaatatgggcttttccataagggcacctgataaaagggaaaagtcaaggcactcggcggggaataccatattttgaatgggacccatctaatacggtaaacgccgcatttataagcacaacggatccaccaattcgaagaaacacaaatcgaccggaaggcaccggggaagccgataagaacgtataatatctgttagtacgcgacgttttattgctatacagcgccctattttgaaagcagggcgttgtattcgattttttacaatttagtaatagttgctcattgcaaatatgagttttaatgtatataatacttaaaaaagaacggtatatattaatcaagctgattcaagcgacaacgtagtgtagcgatgcaaaaacgtaatagattacatcgcatccattaggtagcaacatttgtataatatatactttaaaaattagatttcttattgcatttttgttaatccgtacgtgtgatatactataagtaataacaaaaaatagttgtctactgattttaaattactaacgttagttagaatctttaccttataccgccctaagtaattataatatatcatttttatgaggatcccttaataagcttaataagaagtggatgaccacgatcagtgcatggcatttgtcgcggatcttgatgaatgtgattcgagatgctttcgtttccgatacgtacttcttgtaggctgttgtaatagcaaagatatggatcggaggcgtcagacgaggagcaacggaaaaagaaagtaagtcacattatgataacaaaaatctaaacacttgcctaatttttcagtatcaatatgtcatactaccattaataacttatatcaaattgccttttgtttaggtaaacgtattttaaacatatatattaaacaaaagaacatctaaggttctattttgaacaggcgccgcctctagtcatgaacacggtcgggtggacgcggggtaaattcgattcgccagctgctaacggatcccagcgaggcttgaggacgatagtcaaatgcactaggaaaaggtaattacaaagtttcagcgtgaatgcatgcatcatcataccacacttgcacagagtcatcttttattgcaggattttagttaactcgaaaggtcgcgatcgatttgaacgcacaagatttctgcatagtcaagtacagagctatggatacagatccacgcccgctatgcccacgtggtaagcgtaaggtgcgctgcgatgggaggacacaaatccacgagcgcgatagaactgctgtgcagaccaagcgagtgcgtggacacaaagggactgactcacaggtatgatttacaggagcgcgttcgcataatttgattgagagtactactttgcgctgaaagcctgcatgagcaacaggtcagaagcgctcctatcatacctgcttccgctgctgtagcggaaatacgcgctgatcaacccgacacatacctgagggcgcgatggatggtacgaactatttttgtgttcccaataatttctgacacaaaaaagcaaatccggtaatttaccgcgaaagggcgcctcgaagccaattttcgcatcgccatatctcgtgatacagggcatttacgaagcagtaaacacctccatcgtgcttgtattttcgagtgctttcgaagtacactgttttttctcgtactactactttctatcagtggtcaattttgcgacgtccccccaaaggccacttttaggtacatggctaggggcggcgcctgttaaacaacgctctacgcaagggagttgtattcgaagggtgttaaattcgatgagggcgtaccaatcggtattttacgttatacttccataaaatatatttccgtacagtccgtacatattttattgacgggatcatgtcgcaacatgttacgtatttataagtttggtgtttccatttacagcatttatcccagaagcccgacaaccagcagttcgctgttggctcttagcgctctaacttggtcagcttcactacttcatctcactgcaacttttctgagccccccccaagcaatactctcaacccttgccatgtctgacgccctctttgcccccaaacgctccaacagcaagttgccgaagcaagtatcggcgttctacttcaaaccgctgctgaccaaggacggcaaacctatcggtctgcaggcctacaaggcctgctacaaaacacgcaagcacatgtccaaaacgggatacacgaacctcgtggcgcagagcggtctgaccacttcggtttcgaggccgagatggaggcggctagcgccgttgccacgggcactttgccgccgtgggtacgccagaagacgactaactgctacgcatggctgctctggatcgggtcgggaaacctcccgttttccttcatcgagatggagacgacgagacggtaaaaggttgttttttatttgttatggtaattctgcctaactttaagtgtttttttggaaagtacataatccaccacctgtgtacaaggcaatgctcggccgcgacatggagaggctgtcgagacgaacgtcggtgccgtgctcccggacaacttgggcgcgattctggacgactggacgcacggcaccgagtactacttggcggagtacacctgctttgagctcaacggcgtctgccactgtcccctgatgtcgctcggtccgatcatcaacggtccggatgaccgtctcaacgctgagagtcatgtggctgccctgactgcgttcttgcctttttgttttagtaagaagctctctaacgtttttttttccagttggtgacaactgtgcgatgaagaagaggctggtacgactgacgggggtgctgctgatcggctgctcgagccatcgtcttaatttggcggcccgcaattttctggagccgtacgaggtggacttggagcaagtgcagtcacgcctgaggcgtctgcaaacagtcactcaagcggcgaaatcgaagtacgcaaatttgaatcttggtccgaacctaatttgaacatattctaattttggtatttggtttttgaaaagattaacccccccgcactcgcgggttttttcggtccctggctttgatcaatatacactgtgttaaagctgtatactacatgttaaaagtatgcgtatttgatctaactattgccttccgtaagtacgacacatttctataacctgcgggaaactagttgacaaagacagacgcacatgttgtctaagacgccctcggatgggtagctaaatttcaacagggtgtatatactccaacttgcagtgtcctttttattgatggtgaacaaaaataaaacacaagggcgggtttatgctggaagtatcctatgattgcatcccaacataccaggctatgcatgccttgaaaacaaaatcctgctgtacctagctagcaatcaagtgacacgtcttcccaaccgcgggctaatggcgtcttagcattattatagcgcacgtcctgctcggttttattggattgggccacctccccaggctgcattctctctgaggggtgcatattagtacctacatgcgcaatataacccttacagagcaaaataaagtgtcaacggtgttcttgccagcttacctcttcttttacataccctgatatatcggacgagattcatcttgtatttcgaaccactatgtacaatcatgtatcatatcctgtctgatctgatcagagtacccaaggcatagtaggggtagcactgtctcatacgcatgatggggagagcggttcctgttagcaatctggtagcaatcaaataatcagtctaatccaccattctctgcaattcctactcgttctttgtgcatattttcacctacacctgtgcatttcacgtagaaaaagacgtgctgctctttttcataacatgtagtcatatacaacgtatgagtgcggggggttaaagccttccctcaagcccaagttgaagaacgagacgtactgggggtcgccttacacgatgctagcggctacttcgagctaggcaagttaatcagcacagatgacgaggaagtcatcgaggaagtgccgtcgccgaccgcaaacaggcggctcaagacgctcctggcacagctggcggatgtggggtccgtctctaagaagctgcagccgaatggcctcaacttgctggacgtgcgtgtcctgctcgatggccttctggagatccaaacggtatttataacttatctcgctacgtatatacggcttagatctattcaattttgctgctaactatgtctttttttctcgtttggttttaacgccgattgttcacttgcccgactttgaatcgggattggtgaaggcactggctggccaagccaaacgactctcttgccccgaacgcgccgcattgcagccgtttgtgagggcggaaaaagtcagcgggggaggctacaggcgagacggacccgccaaaatgggtttcgctgaccggatctcaaaacggcgcgaagtggagctcgcgccgagcaccttcgagctattggaggaaattctgccgacctccaacattgtcgagcgtctcttcagcgttgcacggatggtgctgcgaaatgagatgaaatgcctcaccccgctaactcttgaaatgatccttttcctaaaggtgaacgggagttactggaacgtgtcgaccgtggacgcgtgcatctagaccgtaagatgctctttgctttaactgaaaatacacttttttgttgagcacgttcacgttatttatttccacctatgtgctagagcctaaaaacaactacttaatgctgcttgactatgacgtatgtataaatgatattgtcgaattcgctacaaggcaccgtgcagacagcctgagaagcagtctaggattcaactttgcagaactgagcttggtttggcgttaccccgttcgcctttcgagctctatggtacgtcatccctcccgatggtttaccgccgagattgtaagatgtcacttccttgagaacgagaaggggtacggtaatttatatattgatttcattatggaggtgtccttgagttttctgggagtgcccttaggaatcccttagatattacgatagaaccgatactcacttgagtttcggttttgtcgttatatatatatattgctcaccacgcattttggccgcccggatattgtccgttctcaggggatttgagctcgccaaatcgtggtcgatgtatttgtaaatccctttgaatgcctacggcagtgtgggcattctggtcgatttgtatatatatcgcctagatttcggttaaataaccaatcagcggcttattcgatcattctgaatgcgtgtggcgcagctaaataccccagctggttgatataagaacggcaaggagccgaacatgctcgggataataaggagtacttctccggtccggaaaagaattaacagttcatataatcgaccataattcacgttctactacgccaagagagctgtaattggccttgacgtaaaaccctttgtctgttgtatcgcaccgattgttttttaaatgcgttttcccgccattgcggtctgtatcggccagtttaaatggtcgaattttgggtgtgttaggtttaaattcgcaccgttatcaaaaatgatcagatttgagcgtaaaactactatttagaaagctgaaagagaacttatttgtgtcttatgtcgccataaccaatcgaatcttccccctcccccaacgcctgaaaaacagccaatcatgtttgaggtttttccatacaaatcactaatgttggctttttgtccaatgagagatggtacattagtgaataatagggtatcataaatcgatttggtcgagtttttttttaatgaaaaacctaacggtttattcttttccggaccggagaagtaaggagaggtatatataacaattcgggtgtatatatagagctttgtctaaagcttcgtgctgagtcgacgtcgacgcaaaacgtctagcaaactgggcaactacggagttatggacggcgacacgggtgggcgaatcaaccgtccgcggcatcctcaagaacaagcgcaaattcgacgatattcaacccgctcaagccaaccgcaagcggtgctgcgtatcgaatctgcgcttcggacgaaagcctgttcgaccgcatcaaagccgacaaatgatggcgtcgtcagggcaccattaacggctctcaggtgcgccacctggtcggtgagacggagggcaactacggcacgagcagggactgggggacaagtttcagttgcgcagtggtcgttggttctgtctttgccgcagggaaaccagctcgctcgacgaagacaccgtggctataggaagagaggagcctaagtgcattgctaaatatcatccctgtgatattgacaacatggacaagacatcaacatattggtgctagccgaagggtactcctaccaaagtcaagacagaaaggcacgaagcaattgaaggagcagatgtctgtgtgcatcgcgttcaacgcaggcggctctgatcgtctcccccctgcacttcataggcaatcaaaggaggatgttccacttcggggtcatgacgtgttcaccgagctcggtgttacatacacgaacacaggcaaggcatggatgaacacggaaaagtactgcgagtggctgtcgcagcttaacaccagcatgcagatgcagcgcactatgccctcgttctggaagacaatgaatcctcccacgatgaagtactggttgagcgtaagctctcaaacgtaagagttcacaagccccccaccaccaaacacgacgacttgcaacccatgggccagggcattataaagtacctgatggacaagtaccccaaccagaaggaaaactcggagacccaaacgttttttatgtaatgaggtgtaacgggccaggtgtgagcccgccacatcgtgccgtttaaaggttaaaggaggagaagaagagtcttgcttaggccagaagatggtgctcgtggtgtccgagatgaaggtgggtaaacatgcgagcgtggatatctcatctgtgactaactgcggtgttatcattgtgcaagacttgcaggatcttcgcgcaggtaacacattgcacaccgacgtcaaaattgtatctatcagcaatttgatctcgacacaatgcttcacaaatggcgcggaccatatatacgcggtggaaataccgcagcacatcatacccaagaggcttacccttcttttgttgatccaatgattaaattaccgcttgaatgtggcggcaagaaatttgcaggagcagtgcaagcttgcacgggcggcatgttccgcttgccatgttcgtctcatacatagtagtcgcggatgcaacatcactacgatcgaacgggccaaacacatagaagaatgacatcttggctggcactaccgtgcgtttcgctacatgcgacttctcttcgtcgaaaggcctcttggcgtgcggagtgatgtcgcagtcatctgaaacccacttatcggtctccgtcactaacgatcggcatgtacctacagcacacaagcaatacgtgtgcaaggcacgaaatagcgaaaggcttggacctcacttccgcagcataccattgttgtcaccttcggcaccactagtagatcgaacaccgaataaggcaatctgttgccgtaagttggagtagcgttccagttttcttctagcccctttgcttcctcgccattcagcgtgctgtcgcccactacaatccagttgatcgggtgaatacttcgaagatacgattctacctatctttcggctcgccgtctattgctgtcatgatcagtgttgggaaaagcttccgaagacggtcgatgttgcgttcatactcccgcactgatcccgacgcttgtagattcattgtctcttcaatgacgttctccttagcgccaccaacccttttcaatttgtacattgtgttgaagcgcgcatacacggcgcagaacttggtattgatgcgcaaaccccaccaacaagaattgcttggaccagtagctggttgcagcgattggtaaatggcggatggtggtgaagagcaatacctgcagcgatgcagtttgcaaaaaaacaaacaaagttatccgtggttttttatgcacggacactatagcaacaggaacggttcgtttgtctccatccttgtccagaaaagtcacaccaacgccgttgtagtcagcatccttcatgtgcgtaccgtcgctttcccaaaccagcaagggtaaatcctggatagatacaatcgctccaaacgaaagaaacgagtaaaacaatcgaccagaagtgtcaagctggcaacatacccgcgagccgggagtttgctgggcgaacaattccatgtaagctgacagagctttaaagccttcagcactgtccctagccataccggatatggccaccctaatgatcttatacaggactggactagtttctgttctgcacatgtatgcttttaaaacctctatttaattccttgcgaacccctagtgtgcacttcaaccgttctataaaagcacattaattttggccatcttcggttcttggttgtggcgtctggtcggcttcgttgtggtgtctagccttaaatatccgagacaaagatctaagcgagaaagaacccgtaacgtcaggctgacggattatgtcacacagttaaataatatttcaaacggttcccatttctcgatctatcaaggaggcgtcggctagcgaatataccacgcagtgggagtgtgcaataaagaatgggtttgaggccttcccgaagaacagcacatggaagtgagcgcctcttcctgaagggcgacgagaactcggctgtcacttggtgttcgacataaacgtgtcattcagatggtactgttgaccgatttaaggcatggttggtagtcgatagggaccccctgctgtaacgaattggcgccccagtagctcggtatgggcccctgcagcttttgctcgcactatcgacagctgtaggtctacaccacacaaaatggacgtttttacactcctggccaaattaatccggccacccacctattcgaccgtagctcagtcaatactacagatatggcgctgcggttatgatatgtgttttgtatagtagagagaagtacattgtttgtgttaacaattgcgtttttgcggtttgtggggtagctcccatacaataaaccgtttgggcatgcggtccaaactttcggccacccatgcccataataaaattaagaccagtgtaacaaaatgaatgtattagtaatgcgtcttaccacctttcttctcaatcacttcaatgcagcgtcgaggcattgaatctaagagcctattcagcgtagcttggtcgatgcttttccacgcctctagtatagccgctatcaggtctccaacattggcgtactggtgtccgttcgggttgactcggcaagccagcaacgcccacagattctcgatggggttcctgatcgggtgaacggcaggccaatcgagcacgggcacaccttgctcttcaaagaacgccttggtctcctgtgacgtgtgaatcgaggcgttgtcttgttggtagacaaagtctaccccgtagtttaggtgagcatagggcagaaagaactcagacacagtgtagatgtactgtgccgaggcctgccgcccaacgagcaccgcaagctccgtcttgcccttggcgctgaagccaccccacaccatcaccgttctggcgcctcactgctgtccttggcggccacctcacgtcgtgccagtagctttggaggccgtcgggcccgtccaagttgaacttcttttcatctgaaaagatgatgcgcatccagtcctccattggcgtaacaaccatgtgtttagcccactccagacggtgtgccttgtgcgcgactatcagcaccagcgtgttctccattttggtgtagactggctagtctacaccagcaaggagacgtcgtatcgtgcggggtgagcacgcgcactgacactcctccgtcagctgcgcggccatgtagtcgccgctggacgccttgcgaagcagcaaatgggcaagcctcttggacacaacgggcttctttccaggccggcggcgattctgacgttgcggtgcaagggctcgttcaactgcgttgcgtgagcgcatgactcgtcttgcgatagctcgaaccgagagctctccttcgtgtagtcctcgaatgcgtcctttctcctggccactgagccaaggcggcattccccagtgagactagaaatgaaggaagagtgactaaggcctgcgacatgcgcagtcgtccatggctggtgagcagacttaaattgcacaatcatctcgttacactgatcttaattttattatgggcatgggtggccgaaagtttggaccgcatgcccaaaacggtttattgtatgggagctaccccacaaatcgcaaaaacacaattgttaacataaacactgtaccgctctctactatacaaaacacatatcaaaaccgcagcgccatatctgtagtattgactgagctacggtcgaataggtgggtggccagattaatttggccaggagtgtagtacgttccaaaacgtatactaagtgaaagtatctacatgagacagtcaacgggatttgggcttgtctttatgtggatgatcttatgatcgctggctgacacttgggcttgatcaatgatctcaaaactatgttgcgtacaaaatttattatgtaaaacatagacgagttggactatttgcgaaaaatggagattcaaagagatctaggaagaaacacactgagtctgtcgcaagaaacgttcattcaagaccctttagaaacgtttcaaatacgggactgtactacggagccaacaccacaaggtacgagcgtggttctagaaaaagaaaacaatgtaacccctgaacagatagcagctcagccgattgattatcgaggtttggttgctttattaatgcatttagtaagatgcactagacctgatatagttagagctgtaagagagctgagcaataacttatcatgctataataagactcattgacgagcggctcagcgagtacaaaatacttgaaggaatgttgaagaatggcttagagtacactggaaatagcactattaaggtagaacgatatacagatgccagctccgcgaatgaaaaggaacaaaggtaatcaatgacaggttatgtatgaatacttgctggtacatgcattagtcggaagagcgtttagcaagattcattctcgagctctctcagctgtcaccggcggaaaaacgctggggcaaagtctggataaccgcgaggtccttgaaataacgataattccgtttccagtgcccccagttgggcggttagctgaatgttaaccttcagggctctgtcacagtcgtagccatgtaaacggcttacggcattcccccttttagagtttgcgtcggggcctgcacttgtgtggtgcgaagacagaatagagagtgagaagcaaacgcaaattgcggagggaacgctatgggaaatgttctccccccaacaaatacggtatattatggatattagtttgaacagaccggatttatgttggatatctgcactgcttatgacaagcatatcttggacaacctgatagtgtgcgacacggaataatctgagagtggcgttgaagtcgatggcggatagcgattttgcgagagacgcactaacatctgtagtgggagtgttgcgccgtataagctacttcactgtaaaccatagtgaatataaaaagattcaaaggatctgctttctagactttggtggataattcaaaggacaaccaagggaaactcaaatggaaagaagccagcgcttactggcggaaacgataagctgagggatgtgaaggaagaagaaggctgtaatgccatcccctccgatactgatgacaagcacacaaaactactacttcacgcaacactaccatattctgttccaactaccattgaccgagaaaagtcctccatcggataaccagtcgcaataacatcggacgcactggagtctggactattgcacataccactgcgcatatcatctgcctaagagctcgcgaggtttgagagggcgcaaaggcactgcggtaagactccccctcaggtgtagaacagttgcggttagacaggttcactacgcctctgcaccatctcctctatcagtattcacctgttgatccacgtcccgtagcccgcgcgcacgcgactaccgagctacagccgcatcagcacacgtcggactcacgtcaatgcgccgcctttatgaatattgaccaacgccggtacgcccacatcgatcggtgcatcaaccaatgtggagtcggaagtattcactgcaatgccgcttatcacgacgggcaccctcacattgatcattttctggtctccaagagggtttcgtgcatggcttcgcgatgccaagtcctcctatctaacgtaggaatttgaggcgggagcttatacttttaactcttatattaattaagcagggcaacatatttcatgccccactgcccaattcgcagcgaagtcccccgtcattaactccttcacacttccggttttccagtccagcgcacgaaacgtcattcattctttaccatatcgcagaaagaggtaagattgccccggattctcaagcttatttcttctcagtactttcggagcgtacgcgtaaaccaatcattctcatgtgcacagctccgaataatcggaacaatctacaatgcgccgagtgtatggtgtctccacaaccagcgcacatctcggggtgatattcagaaatatatttattcaccgccaataagttgggctggtccaccatcgtttacatgctgtacaccaaaaacaacacaataacgtgcacccgctccgcaagccggcggttctaactcggcggtgtgtattgatctttcccaggtcaactccgtgcacccgcaaaaatacctagcgaaaaaagcaaatcagcaatgagttgtgagctgagctgtgccaaatgcatcatgacgagtgtgtgaggtttgttctgttctttaatccatatggagctgtccatatacgagtgtgatgttgatgtactccggaactacccagtaagtgaattacggtaaggcattgtgaaataaagctcatactgccgaagtaatgtgctgctacttactactaggctggtatgcttccaatcccgatctttaacaataccaagttccgccttcgcattcccatgtgtctcctgctggcttgttgcgtgcgtattggacacggccaggaagcgagctggcggatgcctccgagctcaccacccacaactggtacgccttcggtcgctcaacgtgctccaaggagagtgtacgcgttcagacaatttactgttagacaggtgatcctacctatgttttcataacaaatattctctaggttttagcctaaaccatgacgaaatcattcagaaagaacttttggtttcacttcaattcgttagtcgagcttgtattccttcctacataattaagttcgattcaaatctcagttcggaaccacccgacacttcatgagatgcgcaatattgaccacttatcaaaaagcttaactggctggacgcacttaacacggtataagcaaaagaaacgttggccatttattatactacctgtaatgctcgctaaaagagacatgatttcccgaaaagaatgattttatgcaaaattaaactcaattaaaatgaatacgtgggcagaattattgttttgggttcgaattttgcaataacactaatggctaacgaatagattggtaaggagggtcaagtcgtcgaaatagatgaagctaatctggtaattgaagccgtatcatcgtgtgcgcccctacgaggctttttattttatttatttattttttggctttttattttttttattttttttggggtggggcgctggacgaagttgtgtacaccagaaagactaaggcaaggctcccaccgaaaattatgcagtttatcaagcctcgataagtggtagggaccttatgaaggttcttgcacgcttattatgttaaatatgtttggtatttatacctgtaaacgagatgggaaagagcacacacttgaaaatcaatcgagcactgccgagtatacactacacgcacagctgggctaatcctacgcttcattttgctcacacacacgaatactattgaaggcgtttaggagattcgcatctagagccatatcaagcacatgcgcggtgtgacggaggattgcctgtacacttccttgaatgggtacatgcggcactgttcggttgtagccgcgcgagccagtccatattcatatctggcaggtttagttatacatctataatccgaaatgagcacgaacctcctccaaacctattcccagttattgggtcaatgcagacgtcctaaaatgtggacatgttattcggggaccctcccccctggagcggtcaacagggtaggacaggtaaacgtgggtaagagtgtacacactgcctcctcgcagccgacgagtgatgcatagacgagcccgagtgtcaacgaaaagtacaagggtaactgcggaaggaaaggctaaaacaaggacgagatcaagaagaagctccaagcggtcccagttgagccatctgcgccacctctctcagcattaaggtctctatcagtgtgattcagcgcctactggcgagtcgggacgtcgccgcaaggtctacaacaatcaaacctgttctcaccgaggcttacaggcttcggcgtgcccagtacgcgctctccttcctcgacgacgacgttgataagcatggagacgtagtgggccacgccttcgaccccttgctcaacatcgtccacgtggacgagaagtggttcaaccacgacaagaagacccggcgatactacttggagaagggagagaaagcaccgcaacgccacagacacagcgctcgacacattgagaagaccatgttcctcgctgctggcgctcgaccaaggtaaaatgcgatgtgttttaaaccctctcaaaattattttttacgtgacctaattttgtgattgtgttttcgtggtatcacagatgggaccctcacaggaagacagagtttgacggcaaaattggactgtggccgtttgcagagaactacgtagccgagcgcaccagcaggaatagggccaagggaacactgttgaggaagaacatcaagtctgtgatcagtgaagtgtgcaaacattttcttctcgactatgtgttcgttgcgatacgcgcgaagtggcggcgcaaggacagagggaaaatcatctacgtttagcaagacaacgctactccccatatacaaccaacagatcccgatgtacatcgggaaggtaagcgggatgggtgggatattcggcttctgtttcagccgccaaactctcccaattttaattgccttgacttgggctacgtctcagctatccaggcgctacagtacaagacgtacttgcgactactcagcagctgatagaggttgtagaggcatcgttcagaaacttagataaacagaagcttgaaaacatatttctcactctacaactagttatggagtgtgtacttgcctgcaagggcggcaatgtgtacaaactgcctcatctcggaaaggcaaagttgcgtcgtaaaggaaagcttcctaagtttctcatttgcgatgctgcaattgtcaaagaggccatgatattggataaattttgctagacttaatacctgtctaaaacaacaatttgaagatatatgtgtgtgctacactaaatagaccatcattcctcaaatgtcgataatttttccgtacggaggtagtaaatacagctgacatttttgttgacgccagtcgctgtgtacctagacgggtatttgcatgtcatattattcctttacgcgtacttcgcttgttttgatggggccatgaaacttgaggaggcctgtgcacctgaggttcgtccccggcctcctgccccatcaactaaaggtaaataatgtattgtgaaagcctgggcataaaattttcgattatatatcgtgcatacactattttatatattgcggaggtaagcctacaataaggatcctggaaatgatttatatcggtattaggtgtataatgcgatactttgttaacccaccggcgaccgtcaacccgattttgcagggataagaaaaacctcggggaaaagtgccgtttcaagccacacaggcgtggcaacctttcgagatcccgccgacgtggttccgactaatcaaattactttgcggatttcgcgcgcgcgaactcgttcgcgcctcgattgggcgtcacgcatggttttacgtttgaaagtgcaacatgagcgccacattttagcgcttcaacctaatgtattttttttgaaaaaaagtgagaggtggaccgcgcattatcatcaccagtaatgcggccatagcgtcgctcgtgtattaggcgctcgcaggcccatagcttttggtgcatacctgcacgtctcgactaaggccccatgcggtatgggcttgtcttgggtaggcgtcgtgctgtgaccaatgctgcccatactttcacgaagtactttacgcgtgaacagatggggaagaagatcataccttttcctagacgcatgacgtttatgaggcgctgagagcttgtagatgtgatcaccgggaatttgctaggcaaatatgcagcgcggatggtcttaagcttcttgtattgatatcctatcgtaccgccgctgatgttggcggctaacgtcgagctccagaaggggatctgcccacggtgcttcttccggtctatggcgttggacacacccgggcaaaactgctgtgccagcagctctgctagagaccacccgaaaataataacatgacgttagtgattgacatatctggctgcttatctataaagaagactcgatctcaagacaatggaaacaaatttgatttcggtttggtgtgagcttatggagcagcgttgattgtggccaggtggttatatgtattggcttttgtatggtcaaccttgtcaatgttgcttcgccgacttgtcaacattgacacgcctgtcttgatttgaatacagtgattgtcatgaggagacattgatatgtttgactaggtttttgtatggactttatgccgttattgactccgatatgacaacattgagatgtttgtctttgtttcagtatagatcatgcaaacaagtgggtatattgttctgtcactccgcaaatctaaattattagctcaaaatggcatgaaactcattcgatcgcctgcatgttgcgctgatagcgaatcgacatggcgttcgtcgggcgggcggggcacggggtcatggagttcgagtcggcctagttgggggccacggatatcgcgtccgtgccaggctggtcgtgggccacaagagtaccggtcatactggaacgggagcatggagtacattggggctagctcaaaaccttgtatatggccgtccgtgttgggcgggagtggagatgcgggcatattgaccatttcgaatttgttgggggccgccagcatggcgacggcgccggccatatcgggggtcacacccatggcgtccatgctggcgtcccggatgacatttgactgtgatggcggagacggccatgatggggtcctggggcacgacgtctgggtcgagaatgtcggcggcctcgggcgtggcgtcggagtggggcatagcgggggcgtcgggcataccggcggcctcgagcgtggtgtcggagtcaggcatgccagtggccttgagcaacgagcatggcgggggcatcggacataacggcggcctcgggcaacaggcatggcggaggcctcgtgaatggcgtccacgttggtcatggcgtgaccacgatattggagacacttgagcgtttgtcagcgttttgagaaatgagctaccgatacggagcggcggcgaggttcggttccgttcatacgctcacgaagacgcgtctgattccgaacccgggggaaaattgtaagcaaatctattggttattttaggagtaattgatgatcattggtggaatcgttggaatacatgcgatgattggtggacttgtttcatggcagcaggatccgcatggcgcgaaagtgacgaagatccgcacgttgaagtgatcgcgtgacgtgcataacgtagcttaggtgtggaagtcgtagtacctcaaactagatcgtccagcattttgcttaccaacaaaagaacccattttggccgaggtgccggacaccggcggcacctgatcatagccgccggccgtcctagcttgaggaccacgctcgaaagcgtgcacaccgtggccgaggccaccgccatacccgaggccgccgacatggccgatgcccccgccatgcctgttgcccgaggccgccgccatgcctgttgcccgaggccgccgccatgcccgaaacggacgacatgcccgaggatcccatcatgcccgactcgactaccccgtgcatggccctggttaacccaccaaggatgctacgcccgcggtcccctacatgcccggcaccgcctacatcccggcggctcttaatatgcctgggacggacggcacgctcgccgacctcgacatgtccgacttgatcatcgcgtgcttggccctgataaccctggaagggtggcactcccgtggctgccgacataccggcggttcccaacatgcccgatatttgcggctcgcgcactgaccccaacatgcccgacacggccatcccgttcgcgtcccctgataactccatcagattcatggagtaacggaacaatacacccacttgtttgcattgatttttactgaaaccaagacaaacatctcactgctgtcatatcggagtcaattacgacataaatccatacaaaaacctagtcaaataggtcaatgtcgacatgtctgatgttatgtcaattcagtcagatcaacacaaatatgccaatattgacaaatcggcgaagcaaagttgacgtggttggtcatacaatagccaacagacatgaccacgtgaccacctggccacggccaacgtcgcttcatcaagttcaaaccaaaatcagtagaagcacgtgcctcagcgacttcggcagagtagacgccggaaagaaacggctaaagacgatgcttgattgttctcgtcatgtatctctcgtatagaccaaagaggtcgcatagcaacctaatccaggttttgttagcttgtcgcctctgactcggcagcttttgcggtccgctcaaacatgaaactggtgctagcaaagtagcatacccttacatcggaactgcatattaggaaggcaccaaactgtgctaaagacaaacagcggttagagatcatggcgcagaagtctcggagcatcaagagtaacagcaatccggtcaacacgtgtggggagcatgcacggtaccggaataataatggcagcttcatatgacacactatattttgacgctgcagcacttgcgcagcgctttctactcgttctaggcgcttatattagaagggctctatgcgcccgctccgtccatgtgatacaccaatgctgtagatggacagatcgctggtgttatctaggtcactccgccgcactacaacggcaggttaccgatgtaaccttgacgccgcggtatcggcaggctcgtgagggactactgccgcgttgttgaactgggccatccagagcaagatcaacaggactcttgtagctgcaagagtgagtttattagtgccacaatttttcgctcatgtttcacaacaatctgatttggattctctacagatgggatctcgatctttaggacaatttacgccaatgtttttcatgctcagtgttgaacccgctcagaattaaggccttagccgacttttgatgggataaatctaaccgatgagattgaaagtcgatggagtccgaagggcggcgccggccgctggggacctcgcttaccctatcccgctgatatacaatttttctatattcatcttatcgtcgccggtgggttaagttgatgttgttgttctcctgtctgaggcagggtgcgtacccacaggaatgttagagtgtttttggtgaccaagcaggttctttcccggcgtcagcgcgttgccagtagtacagggagacgagattggaaccttcggaccaccaatctgcttcggctgtatgacacccacgaccgggactagactaaaaatacgtctcgcagcgccttcgcctgaaaccgacactctgattagcttcgggctggtcgagcaacgaagatctgggatcttcttccgcggatctgggccttggtcgtgatcgcatcaagtcgaccctgatggggaagtgcataccggtctgatccaggattagtatgttttgttagtaaatttcgactctcgaacctagatccttgcttgttagtcgcttagctcgttttgccgtctctttgggtggtcacaaccagattacggtaacaggtggtattttagcttcgtgggagtacttaattaacgggtgcttgcaacgtcagcacatggtagtctctcgacgttttggacgaccggactttcttttgcgggggggggggggtacggagctgtgtaccatttgcagcagcgaactagaaccagaaattatgcgcatagcaccaaagttctaagctatacaaaccttctggtgttcaatctgtctcccgctcaaaatagtatctatatatttttacagtaaagatagcggatggacaatgtaaaccctataacctgaatttgattcgttactaatacaaggtgtatatagaaaatgcacgttaccattattagaactagaaaacgacctttcggagtcgtgtgatgaagcgcctcgcccaataagaactgaacgcgatgaagaacacgaaggcgtcgatggcagaagctgctgctgcccatgcattacacaacaccccccccccgcaagcgcagcttcctgggtcgtcacccgaagagcgtttagctaaggccgcacaggccgcgcttgtacctgagctgggtgagcggtaatgccttcgtgagcaggtccgcagcattctcgccactagaaacgtactcgagcgccatagtgcccttggtccaggaggctttcagcgcgtggaagcggatgtctaccgccttctgggaatttgacgatccttcgcgcttgatgcggtggattgctggaatgttcagagtgagcttgatcttctcagcatgaccagcaaagatttcgtccacgaggagcttgatccattcaacttggaggagacgatcgttggcagaaatgaattccgcagccgtgctcgattgagcgacgacactttgtttcacggaaccccatgcgaccggagcaccgaataaaaatataacgtgggcagacacggacttgcggtccacgcggtcgttggcgaagtcggcgtcggtcgcaacgcgaatatcaacttgatcaggtttcagcatcagcgtgagttcttgggtaccagagaggtatcgaaacaggtacttgacgacattccacgccgttttggtcgattttgcgcagtgacgagcaagctgggtgaccgtgaagatgatgtcgggtctgaagacacttgccaggtataaaaggctgccgacggcctctcggaaaggcacccgcttcatctctgaggcttcgtcttccaagcgcccagtcactagctgatctagccttgtgttaggtaccatcggtgtgtgtgtttcgcgtacaggtttcatggcgaagcggtgcagcatttcttcaatgtagattcgtgagagttgaattgccccagcctctctccgatccacacacacacccagaaactgagacggttcgcccatgcccttgacgttgtacttcagactgagcgccgccattaatctgagaacttgagcttcactaggatgcgccactaaaatatcatcgacgtagagacatactaacagcaacccgttaaccacccacatgtaataaagacaagcatcacctgtagttgccgtcagtccatagctctttaggtacgagtcgatttcgcggttccactcgcgacctgcctgcttgaggccgtaaagtgccctccgaatccgccagaccttgctctcttgtcccggtacttcgagcccttttacttggcggacgtacacagtttctttcagcgttgccttcaaatacgcggccgggacgtcgccctgtcgaatcaccatcttgtacttggtcgcaatgatgaaacatatccgtacacacaccaaatcggtgacagacgcgcgagtctcgacgtagtcaatcaggaaaacttgcttgtcacctcgagcacagactcgtgccttgaactgaattttttctccgtctggaccagtcttgacgcggaattgtacggtgttaccgaggacatgggctcctgcaggagggccactaggacgtaagtgccattatctgccaaggccttcagctctgcgcggatggcacgttcccattgcggccattggggggatcgacgtgggagtgagcggttcgcggatgatctctgctaaacaaatgaaagcagcgttcacggccctcgctgatatccgctccgagcgtcttcttctcgtcaattaggaggttccgttgacttgttcgactttgttttgagaccagctggtgtcgcgaagacgagcggcagcgttctcgcggtctctaaatgcatcggctctgaagcgctgcgactgcgtgggcggtatttcttcgcctgtttcggcatcttgtggctcatcagcgaggggattaatatcggtcatctagcaggacttcgtccaccagcattgtgtccagcataattacgtccgtagtttcttagggcgtccttgccctggaatgtagacccgatagccccgtatttcctcactgaagcccacgaacccgccaatgctgcctcgcccatcgaaacggacattctttcgtcggattggttctggagtttgaacgacggccgtctgaccgaagataggaatccccgccagagatggtttggttccaaatatgcgctcgtgcggcgtaatggatgaccctcgcctcggaatccggtttctgatgtatgtagcgtgctggaaagcatcttcctaaagataatgaggaaggtggctgttgatcaacatggcggctgccatttcagtcactgtgcgtatagctctttcagcaaccccattttgactgctgcgacagcgcgtggtgtgctggtggcggaggccttcatctaccaccagcttgcgaaagtcagctccgataaactctgtcccgccatccgtccgcacagttttgatgctcgcagcaggaacttccgcttgtctctcgatgaacgttagaaactccgctgttttcgcgctggcttcgtccttgctgcgcagaccgtaaactcggatgcactcgcgccacaccaccaccataaagaattcgcttccgtggtacgatcgcttcactgggccactcagatcgacgtggcattcgccacgagcagccgcttcactcgaacttctcgttgcaggcgcagtagccgtcgtgacctttgccaatgcgcacaacctgcacgccggaagctctatcccctgagagatgacgaccccacgcactgccttcgtggcggccagtctccggcagtctgccatgttcaggtggcccagacgaccgtgccaggtagcaagagatacgtttgtacggagcgcagccaacagggccgagccaatttcgcttggaatcaggcccgactcaggagtgtagacttcatagaccccattggcttctcgcgcgcgaagaaccttggtgcgctttttgccgtgtatgacactccattcattttcggcgacgcggacgatgtagccactgtggactagttgagacaccgacagaagagtaacagacagtgtgggcacgtgatatacgttccggattgacagctcgcgagtctctagtttgttgccgcaccgaacaacagcgcgaacattgagaactgtcctgatccggacaacccttccatcagcgacggtgaccgttacgggtgggtcgatagtttgcaagcacgtcaggtcttttagccggcccgtcaggaggaacgacgcccccgagtcaattagaactcgttcccacctgacgccagcgcttcaggctctgtcctcgttcaatgcagaagccgcactcccttgtaaccgtgctgaagtctggtctcttcccttcttgtcggggcagtctagcgcaaagtgaccggtctggttacagttaaagcagcggatatcttctcggttcttgcgacttgcgctctcctagtggcgtgggcggtttccggagtgagccttcttgtgcttctgttctactagcatagctgcggcgttacccgacttcactgctgccgtacctggttccaccctcaggcgcttaaaccccccggtcccgactgggtggctcgttggctttgtaggcaggcgaccatcactatccgccatgtaggggagatgatccaccagtagctgcagcttttgggccgcaggtgtcgtgactgcgagacgtccgccgtatgacttcaactcgtcggagtacttatagtaggctcacttgatgaacgagtggatcgcctgccgcgcgttcgcttccacagccaagcctccagggagggagtcagccatgtttagcaagcgctgggcatactcttggcacggttcatgccgacgcttgggctccagcataatccggctcatgagctcttgctcgggcaacttggacttgtacttttcgattagccgagagccagcgcgcaacaaggtgaggtcagaatgcatcatgcgcagctccgaatacctgtcaaccgcgtttccagtgagcgatgccgcgaagatgctacggcaccgaacgtcactccagcgatgaccatctagaatctgcgcgtccgacagctgatccaaaaacttgcgctaccagcgtcggacgccaaagtcgaatgacccaggcgccacaaaccccgagaacaacttgaccgtaatgttcttcctgctgggcttgccgcccagcggaagagacgccacgtcggagccagacaccaataattcgccagctgcgcggtcattggctggaagttctgggaactggaaaatagctcggtcgcgtagcgtgggggctgggaagctttctggcgccgcgtgaccttgctggccttcgcccatccggtctccgctttgggtctcgccacgtggccgtaccgctcggtcgttttcgatctcccggtctccgtgtacgcttccatcacgtgacccgggctcttcctcgcgcggggcgggaggggatcggtgcgctgaccgtccctgacgtcctaccacggcccggcgagcttgacgaagcctcggcgttggggtgacctgcagcggggggtggagaggagcttccgaggaatcttgagatcccgtgagcgcggcgatgaaggggggaacgacgtagcgacatttccagctataggtagaggccaagactcttaatctgttgagatctgtgagctaggaggtaaaatccagaatgaattaatgttttagcctgggcctctgtctaccttccgcgcgtgtgtgagcaatcaatctagccagaagctgctgcttgcccatgtattacccaacataaaccctatcgagaaccacaagagcgctgtcaagcactttctggcgggtcagtgcccgatcatctgcgcgtaccagaaggaatgaccaacacggaacgctgtacaggatccctaagaccttctaaaattgtcaagccggatcgagtgttccgtgattagtagcctcaccaccagcatgcccgctataaatacgtgctagttggagcttaattttggtcaattggattcatttttgttgggggtaatatgataatattactgagagtttagtattagcaaacagctggtcttaaaaatcccccaaaataatctaggattttcgtttgtttgtttgtttgtttgtttgtttgtatatttgtttgttgttgtgggtggggggggggtacagttagtttagggatgaaggcagttctccaggtactccgaacgattcagtccagtacaagcactacacagctggctaatataggagttaacacacagctctcgccacctggtgctcgtctgcatcgctatcagatccactttcatcgcgctcacattgcgcctactcgccaaactccgatgcaacgctttaaagccaaccaaccactgacaaaacgttagctgtatccaaccatgacattccatctagcatttttattgaggataatactaccatgttggcgtcctcgccgcgtttaagtcggacataatcacaccacgctttggttgggtaacggctccaatcttgaagacgagcatcattatcaaactcacttggcacatcgtctaaatcctaggatctgactacaaaagcgtcagctgagttttgtttactatgtatcacaggaaggtggcaaccccgcgctgaataataccctcgggttatactttgcgaggtcctgcacaacccatcagggtaggatgacaatccttgagcgcggtgctcgaccggtgggatactctcattgaaccagcggtgatcaacggctttgtcaggtaaacactttaattttagccccgcactcgcaacaaccatgcgatggtggaactgaagatgtttgttgaagaaaataaacacgaccaacgccactgaactttctctcgaatgccgtccgttattactgcctacttgttctcgcccgttggtgcgcagcgtgcattcttaatgctatcaaccaaaacaccaaattgcttacaaacgtagctgtagtcgctccacctaatcgcggctccggtgaagttgaacgaacccgagcttacgtgaagcgagtgtcatatattcttgttaagtgtcgccaaaacctggtgagggactgcaacctcatgagcgagtcgtgcagtgatgaacttgttgccgcgggttcagtgacttgttagctgcttcatctggttccgttacgcctcatgtcgacgtgtttctatcgaaacatatttcttccagcgaagcccaaccatatatcggtgcatgacttccaggttttgtcgaaatatttcagcaagaaacagcagggctttcgttgcgatcaattgggaacgaacattcaatgctgcgttcggctagacatcgagagtggaaatggacatagttgcaagccgttttgagggaaatggtctagcgcggatggggttaacccatcctgatggctgctcaatgctcaatccatgttcagcaattagagtccaactaacgttcaaatatatattcagcaaaatttactgtctgaataaacactcttcggagctgtagaaccctcggatacactgacataatggttggcgtcgagacgtacgtattgtgtgtttgcctactgctactcacactggacaagcaacttactacgccttcgtgtggctcttcgaaattagcactgcagatacgacttccgccagccatatctaaccttactttttttatgccgttgcacagctttgacggtgtcgagtccgcatcataacttgaagattgagttcaagtaaaacggccaccatttgtaagcagacgcagcattttttcctcaaaaagttttgtacagacatgttatttattagccatacaagtttaggtgcctttttaaaagaaaaactccatttaacactggctaattggggaaaccttaccgcaaatggcccgttttcgtgacacggtcgattttgagattgtcaaatattttgctaaggaacgcagggcttaatccatcttacagtatatttcgtgatactcgaaatgaagatagtcctgtggttaagatcaccctacagcgctagctatcgaaggttaaacacttgcattgggccgtttgcgtagcaaggtggcctcaacttttgattatgcaaatccgatcgttagccgattgcgtctggttgtgcctaatgcaagcgatatgattggcccgtgaggttgcaatgtggcgacagcaagagtcaagttgcttttccacttaaaagccatttcatccgcccatgtctacccactgcatgacagtttagcagtttaaattatgtgtttagtaagatcacattctattctgtaagggcatggtttgggctttgatttatgctggaaagaatttctaaaatgccaggggccaaattggctaaatctacgcgaatgtagtaagctgaagggcggatattacccaactgtagacgcacacacattggcatacgaaggcaacaccacttgttgtagtctcaagttagtcacgggcatgtctaataagcgcaatggcggcattaaccgcttttaaagaagtttaaaaatgtaaatcccgaaaagcggtaggtttttttcagccagacagtgttaaagcacctttaatcaaatgacgtagcattgcattaaaatcgttctaaatacctcggatgtgacgctgattcaaaaccagagttcttcgggaggcggaatctcattctcggatcacacatccccggctcgaaaccgaatgccgagatccaagattgggtgtaacgtgtgtcccctactcttgtaacgccttgtcccggttttttttctttgggaccggacatgcttctgcagtattagctgtccaaaaccactaatgcctataatatatggcacgagcacccacacagccggcctcgagccaattcagaagggacaagcgaaggagatagagcggtcaagcacatcgttccggttagacgcccgggtgtgctggaggataaaagacacatggctggtcacatttaaacgttcgaaaaatggctggatcgctttatcaagtattttgctgttgtgtaaggctcactgaacgccattatcgttcaggctgtacagcgtagtttaggtaggctcagacccgggaggcagggggggtagcttatgaaaacctgaaacttacaatacttataagctcagtttgatgtgaggccttatgcaatccttataggtatcttcggatgccccattacctcaaccttcaaaaacgcgggaatatgaatgcaagcgcacaccgcaactaggaagtgaaacagggttgccaatccggatgtacaatatgtttcgagacctgacttgacatgacgctacagccgagaagttttcaaggttcttagatcaggcggtactaaacactttcagcgcagctctgaacggtacgccctgtcatgggatcttgggaggtacactctcttgttggcggcagtacttagaggaattaccatcctcgaaccacatcagcggcagcttgggtgtcgaggtagcaaccacggtaccgtagctccataccgatatatgtttatagtacaggcatcagcctcaatcatggatgccagtacgggagcatgaagcgttgatgctgttggtcgagatttcggatctagggtaggatctaatgacgattactaggtatgaatatctacgatgtaaatcattgctaaatctagtgcaaataagcacttccgcaccgctcaattttcaagtatctttaaggcttaggttatcgcctgttgttcttcaacccagtccacaccgtctgtcgcagcatgcatagaacaccactcaagcattactggagctgaatgacaccaccactcatggcattgtgagcataggccaccgcgcgagtagcttcacgcacgtgagcccatgaaggtatgcaaaaagcattatgagctccgtcgctagcccgacctcggtagaacagcaaatgcttgggtaacggaaggctaacccggccggacaaacagtgacaaaacacatgcgactgccattgaatggcttttatcaagaaggcggcggggggaggggtattagtattgaaaacggtgtaaaacagctagaaacatggcgtcgaagattgtaatcgatgcatgttcattttactcagataaagccggccagcaactttgagccaaaattattctactaaaagagttaaaatttacaagaaacatataaaatacacaatatgcttttggataggacagactaaataaatcagtggaaccgctttttctactcggacatggagatgatttcttggaacctcttttctttgtggaaataaatgggtgggggaaaatcggtcaattgtataaccagacagcgcgcttaggcaatgcctaaacaggggttcattctgggatagcagtaaccccggagggagggaagtgtttcagctgagaacgattacgcacggtacaattgggataagctatgcattagccataaggtacatacggggagacaaaagtacaatatacggaaaggtcacaagatagaattatattttgctaacgcatttgcaatgctgtgacgtataccgtgatgacgaacaagcaactgcccatctattccgccatagctgataccgatgaagcgcagagaatgctttggactaatagttccgccgcctcttcaatgctgccaaattatgaaccccactcgtagcaccccgatcatcatatactccttaacgtcgcttgtgaccttacaaacttgaaacaccagctgagttcaagtgcatcaagccctgatgcgtgaaggagtgagagaagcttccggaactcagcgcgtactgcctatttcttacacccgtttagttggcctttcccttttcacgactgacaggcgctccagaactgatcgggatcgccgctacgaaccgacctaacgaacattataatcgtgtcatgaaatgcgattacaaactttgtactttcctaacatcggacacgctcatcgaccagctactgctctgcgtgagtacggagagatgagaccgttcgtatcccacccagccctgccgcgtccaaatatgctgcttgccgtacgcgaactgttgaagtccaagtcaatcggagaggtgacgccaatgagttactccatcaacgtcctgactggtgatgcacagacatccacttttcgtcaacgctgcatgttatgttcgaccaactcaagcgcgtgtacgatctgcaagttcgccgcacaaaggaatcagttcctgtgacgatgatgagactttctgctacggacggaccagtagccctggatgcccacatgtacggatgcctagtattccttgaaggtaggctgttgcatccacattagcaacagacgcatggggtgacctgtcggagcaatagctactcggtaacggataaatatggttcagtacattgcttacgacgacgccttctgcggtccctacccgtccaaacgccaccaaaagtgctcgaacaagccacataccgccctaaatcttgcccaatcgcttaccacctaatccagtgggctcaccccgtgcatctctgagcagtgtgatttcactctaaaacgattcctgacacactctattgtccctccatatgttattagacacccgtgcatagtgcattatacagaagtattcggtctgccctttccagtgcatttgattatcttaacggtggttccacagaccacgtacaccgacgaaaccaaccaaatgaactcatctactaagcggctccagaaaatcgcgagaacgccattgcttagctgtgtgaggtcatcattttagccccgagatctccgtcttcgatggatttgaagccatcttcaaggatatatattgcaaaacacgaaaactaccatcgaattgggagtcaaacacccgtcaacgcagtctgacattgataaaattgtgacatcattgttccatcgcttgcattcacactaaactggaatcgccgtggtgtcggtctacccctccacggaaagcgcaccgtcctcacaagtattattggcatgagtgatagagagaaaaaccttcagtcagcagttaaaaataatctcatgtggctactggtccttccatattaagaatgacgtcaagcctacgtaccgcacatacttcgctggcaagatatcgcgtggtggggaggggttgacttgtacagcctaatttagcgaaggtcttggcgcgctccttctgtagcctcatctagttcgcccaccgtatttcgaagctctcgatcataccgaagcgttcaggtgttatcgcaccatttttgctgctgcatgtcgcggtggccctttatgggactcttcgtagcacacgagacacttttggttgagtcgcaaacacctaaacgtgtttgtcaatcgaacgctggtgaatctccatcgtcgctgcatcgatatcgtacttgaagaaagcaacagccacctggtctagcttgtcgaacaatgcctggggatcgttcagtaaaacaatcacgaagctatgccaagaataagctagcgcattagggcttgatcgatttacagaatcgaatgtactcctcttctcttgtagctttaagaaaatatcaatccagtagcttttttcgtcacggacgattcattgcggatgaagtcccaccaagcatagagctgtcaaacaccgttgcagcgatgtcatccggcgcgtagccaatcattttcgggttgaagtcgtcgttccaattgaatggagtttcatgatgataacggtactagtggtactttcttgcgcggaaatcgcaacccatcacaaacgcgaacacacaccgcctaccgtgggtggactgtcccgcacttttagtcagattttctgagcttgagtcgcaatacagttgcgtcctacagtagaggcttcagggacgacgcgtaaggttaggttggggtgtcgtcttggatcgcggtgcgaccgattccttcaacgtagtcgttatcctcttggacttgcttctgttcctggatctgttctgtatacacttgctgctccaaattgtcggacttgccgacttcagccatagtctctatttccttcagccccatgttacccccttctgctgttccttgatcgttgccacccacatcaacgtccaagttcagattcgcaggtctgctattctcctgcaaagaatcgtcttaaaccttagactcctcgcccgtcgtgtttgtctggggcttccacgtctatgcacagacccccccatctccagaccactcaagcgaaagtgtactcgtaattactttcgtaaaaacgtaaaatttagcatatcatcaagtatatctaccatgacgcaatgatatagctcaagtgtattgttgtacgaaaagatataagaaggaaaatacgtagaagacaaaaatgccgtcttcacagtgggtacgcagcaaatgctacaagtcgtgatgctaccgtaccatcgcgaattggatgctcgaatctgctctccgtggtgcccgtcggcgtgcaacataatgctggtggtccgacgaggtgctgcgacatcgtcattcttgcggacgtcacacctcgcggcgagcgctcgaagggaacacatcccagtatcctcctcgattgtcgtaaggactttcacaggacagattttacacatatatcttatgattttagacctcacaggcttacgctggctggctggctagtggtgtgcgaggtcgccatgcttttgttgcagagcgcaatgcgcgctttcaggggcactgattatggcatttatatttatgatgacagaatcggtaaatagataatgccgcttggaaatctgcgccataaaaaaacgacatgaggaccatccatatataaataatggtattgtgtaagtgcgccaatttacattagcttagtcacacagaccatctacagtacctaccaatagcttgcgttctgacgcagaagcaaatttgttccagcgtaaccggatgcggtccgttgctctcgtgcaaaaatgtggtgctggcaacactgaagaactgctcgacgacaatggaggtcgacgtatagtgcgaagccgattatactgctgctggtgctgagcatgacgtcggcgtttcttcaaaccatctatgaagaatccttgagagtcgtcgtcagcccgatggctccggtgtcggactcgcggcgaacggccgaagtaaggctttatcagccctagtgagtcggttggtgttgccgcgcagcacacgtacacacacaagtcggggctgtggaagatgtccgattttggccctgttgtagtacagaatagtcattatgagtattccaattcgcaaaatcacataccgttaagggcttaccgagatagttcgcgtagttggtttgacggcaatgtgtccatcaaaccactcgcacactctgcatcctctccttgaagtgcctttgagaccaactcgacattctttagctctttggaaagggcactgaggcggcaaatacggattgaggtggggaggtgatccacaatggtgtcgtggacatctaggtgctccagaagcttaaaataccgatgcatcatggtgaaagtagagctccaccgggtgtcctgctgaattacgggtgtatgagtataaacttaaaataataaaaaacaatttgacgtgaattagtataaattataaattaaaagagtaaggaaaaattaaaaccctaaaataaataaatagtaccggagtttagcagattgagccagcgttcgaagcgtggtcgtcaggctctgcaatctgaatatccgcatcgtggtcttccagctctttctgcaccgcgcgatcagtcgatgcgaggcacgcccgatagcaggaatgtggagaagcaccagtctcagaaacgggtgaagacaagtgattggaaaattgagggatctggacctcgccacagatgcggaagagtgaccgacgcagacgggcccagatggatcgggatccggactcgggtggatctggatctgcaccgatggagatccaagatccaagatccaggatccagatctaagatccagcgtggatctggatctacacccaggcgtaatcaggaagttgtggacatgactcgacaggcaagcagctgacacgcaatgaaggtaaagagagcccatagagtcggtaggtacagatgtgatgataggagccacatggttataggactttgggatcggaacgagcataaatcaaaaccgaatttgccttgtacttcgcaagtacttcgcaagcgcttcctccctcgtctggaaacgggaactacattggccatacggcgtagagaggttagcggtagcagatctagtgttggttaacactggagtaatatattggccagatccaaaaccttcctagtgaactaccttcaagtgcagatccaagatccaccggagttatctgtttggccggtatgtccttcgcttctcaactgtcaacgacaccgtcattggaggcggcaaacacgaccaaggaagacctgcgaaggcaacgtaaaagacaacaccccgaaaggcaacacccctgaggcgaggcgggtgaacgcctgaccgccgagatgtatagtttagcgcgccccgggtgtagactcccgaatggggtgcacccagaacaaaccctcgcaggagatagtacatctagatgtacactccaaccggggtggcgtgtggccttgtgaacaatccctgtgggttcgtttgtcttcgtaaccaggggtcttcaaccgtggatgagttatcttgatatttgtaggtcgccatgtagcagggcagaacgtaaccttcctggacgtcgcctctgaaagcctttagacaacaaaacaatacaaacagatacagagttatatacaaacacgtagcccttccttattctttcggaccatgaaagggtcggtcactaccccagtcaactctagccggactccgggatactggtcaatcccggtcggctttggctcacgtgcaccatcctcaagtactgagggaaacttaatacaatcgagtacttcctaccacccaataactcttaaatcaatactttccacccggggctactccaaccggggtgacaaggtaatcggtaatatgaaatgcggggccttcctggtctggacgagctcaaccgcaactaggaaatgaaatgggatggacccacctcgggttgtcgcccggtactcaccccaacttggactggacttggttgcgggagctcgacccagatgtcacagttgctgggccctcacacgtagacttagtcggtcccctgggaatgcacgtccggtaggctgctccaactcacttgcgcgatccttggcaaaacgaactctgtttatctgttatctgttgtctctctgtctgtctgtctgtctgtctgtctggctatcttctcttgatctttacatgcactccatcttgacttgtcctcactatgatcttgtcgtcgtaatcgttcgcggcccctcgtagcataattccagcaagtataacaatcactgggtacgcaagtgaagttcaatgggagacttccaaaaatcgtctattctaatgtaccaaattgctcccatctgctgaaccatgtgtgtactaaccttggactaacggatgctcagacgcaaaaggcgtctgatcaagtaccgtccttggtactgaccaaagcctccgatttgccttgacttcacagactgatcgaagacgaagatgttgctctgtacgataaagccgtccccactccgcaattgttttgccaagacagccgtactacaccagctatgacgaaggcagcaaaaaagaagacaaagggcaagaacttcaccaagtccgaagtcacatgtgcgtgtacgctggcactactgagagctccacagcagcagtgtatgtgtgtagcaagcatgctagtacgttattcttcgacacgaaccgccgtggacggccccttcgtgaaggcccggacttgacaacgtagtgtcgtgagaacacctcgagcaacatgccataggtatggggaaggagagagacggtattgatgaacgacttctcgcaccgcgacttgtacatgaacgtccacgcacaaactgcgttagaggttagagcagcagtcgttatgtagttgcgctcccgtatgagcatgcgcatccttatttagcacaccagcttcttcagtagtgcgtgttgcctccttcgctgttgctggcgttggactgaaagcgatgcgctaacgcgagcaaggaggcggccagtggggacggacacgattcggtgcgagagccgacgtaaaggcagagatttctgaaataaactcgggtttttggtggcagtcggatgaccaaaggaggactataccggtgccaagtggtgaactatatcgttcctaatctgggtttggtacaacatataggcgaattttggaagcctcccaatgttccacggaatccgaacagatcttggctggtcggcttggtcggtcggaaacatcttggacttgtatactgcatattcacatctggggtggtctcttggtatctttatccaggattcaggattatctccaaacaggatcacctccacttgggcttcacatctgggatgtcttggacagcttcacggtttctgggtcttcacttgatccggtcgggctccacttgtgttgtacagggccccaagagcaggcggcctccaatcggaggcgctattacgctcccatgggctttgcctctcgttcggtacttggctccagccggggtccgctcttggggacatctccatccggggtcaccaaaccttgtacactgccaacgggagtccggccaggatccgcttctcccatacgccacgtgtcgcaatctccctctcccatagtgagcctctgagccaaccaatcacaagcgcggctcggggaatcccggaaaatctccaattccatcgtgtcaccccggccggatccagatacatccaagtacaagattgctggatttggagtagtaccgcgagcagagtgaagatttccgcgctgctccacccccatcgccgcgtctcgcccagactgttccgtcttctacgctcggacgcttcagcaaccaccagagaagtagatccagccctaccgacgggtacacaaggtgaccagttcagcacacagatcacggatcatcggggaaccccctccgtaagtccgtgttcaggcgcagttgggaagttgatcggcgatcttgtaaattttgctgatcccgctacaccacaaaaacaccgaccaaagtcgcaaggcgcttgttcacacggtggttgtcgcccacaacgtagacaaactggtccagctgcttactaaagccccgcgagagcatgttggcaagaaagtctctgtgtgccacagcagagcgatcatcgtcttcctctaagaggagagaggccattcatagcagtggggcattacctggtcagtgatctcgtagcgagcaaaggcggtagccttgtcctcgcccaagtgggtccacccattcagaatcaggccgaactgcgctggcgtttttgcagcaatcgacctctcgaccgcccgtgagaccccctcctgtaccacacgcagtgtctcgatatagacaggatccaagttcgtgtagatatagataaacagagtgaacgttgggcgcggcgggcgggacacaaagaccatggttgggaagctgagttgctgaggtatcggccactgggggctctacaacatgcacaaatgacaataacaggcatttgaacacccttagagaacgccaccaaccattataacgattgtttttgaaagaccaatatattcagataaaagcgatgatatttagtaagattacacttcaaaatatgatataaagtagattttttttgtactcagaaattatggcattgggtagattcgatgcataaattatgatgtgtgataggccctgagtccacaatacattaatttatgatatgatggttcattttttaaggcaatgtcattttcggtggccctggagcgcgtgtaccagaagactaaacagtggtgtttagcctcaatcattttcgtccttaacttacggacggaaattcgatgaagtacgatacatgtatcggggtgttagccttaaagcagaaaaagactccatcctcgctcagcatgtgattgcatctctcgcccgtcaagaggatgcagtgaagcagcatagagcagcaattcatgagatcatttgcatccataaaggtgaaaactagtgcaatttgtttatggatgaaatagactagctagctcgtcgcatttaatcctacaaatgtcacgcccgtcggtagacggctccatttccaacatactacttgggtcatcgcgctcgttgcgatccactgtatcatcttcaagctcgatcagggtgtttgtgcaaaatcatacacgccagaatgcacctcgtgcagttggtcgtagacgtttgttctagttgcctcctaatgagccggaaccgctgcttcagcatcccaaacgcgcactggattgccatacgtgccgcgctgtgggcatagttgtaatgcgcttgacagcgagaaagccgaccgccttcttctcgaggaatatatggcgtgagcaattcgcaattccgtgtgtaaccggcgtcggcaagaaaaggtgcaccagaaggaagtacattttgcaccgatgtgcccagtttcaaagctttccacgtcttcttgccactgtacgacccaggacgcatatcgaagtccatgaaagggcggtgcgagtcacacaaaacttgcgaattaattgcaggtactccgctgggcgagcaatttagccgtccaccgccccagacacatacggaaatcatcgcacagcagcgaactcaaccataatatctctccattcttcagtacttgacggcgtcgaatatggtctccagcacgaccacaaattactcgaagcatctcgttgatagtatacactgcatacggcttcgaaatgcccaaaacgagccctgcctccttcatactacccgatgacgctagatacaaaagcagcaaacccattttcttttcaaaagaatgctcccggccttgaagtagttctagagttgcacgagggcggaaaacttcaccgattcgcttgaaattgcgctgagagcatcgcaagttctcgtggaaccatgcatcatagcgagtagatgtcaggagcttgtcaaaatctagcttggtcactgtgagttcgttcgtatagtccaccttgccattgtccgaaggcgtgttgtagctacagcagtccccgctgctagcatcgcgtgcagcagtacaatcgcggttgtgtcgtcgtcctcgtctacttgctccacgccaatcgcacacttgcttctatctgcctctataaacgatttatatcggagaataaactcacatatatattcccccaggggtgagaataaaggaggcgtctgggaataaacgtctgaccaatcaaaacagttcgaatttatccccagacccagacaccgacggagaaaccagggcctaatttgggaccggttggggttagacggacactatcaacgcgaagagcggtttggagtggtgtgccgcatagatgatgagggttggtacatatgcgtctgcgcgcaccagacaaagtggctcacatcgggtgtcagtctacaatgagcctggcttactggaggacccaactacgcccttttcctcggtcgagcacacattggtcactgcgagcacgtacatgatcgtcgggaacgagtgagtggtacggacaaaattatgggcgggagcacccacacaaaaaggaggcgtagccaccaaacataaatacgctaccacgcacataaaagtttcaacactttgacattgctgcaatgagggacggggacgaacatggtgatggagaagaacggttgcagctggaatcatccaagtctgaagctgagaccgaacctacggaaccttcacgttgtccgtggacaaatgttacagagctactgcgtctggagcattagaggcttttcgagagtccctaccgactaatgacattgataaatgtactcaagttggttgcactatcgatcacttaattgatagagactacagcctcgcatgggccgaccacaaaatgcagtcacgaatgatcctctgtcgttctgagagatgcggacaacaggaagcggctggttcaccggcctgttcatgccgttgcaattgcaaatcctgcctgaccactattcgttcctgtgaggtgttccagcagggagagcacatcatggacagagatgctccccctactccaaaaatgcagcagcttaccggtaaaatgaaggacttattgcaacgagccgggatagtggagagaaaaactacagctaccaaagttgtacgcatgcttgctgcatttgtgcaccacctcaaaatggcagggccagctcctacagatcaacaggtcgccgatttcgtgaaaacctataggcgtgaccggcctaaatactctatgaagccaatgattgagctctgcgatgctcatttgtatgacgacaaggtgattttgtgtgatagcgagggcgacgcacgtcctggagcggctagaagcaatggttccaaggtgtatcggctccgagtcgggatgacctgtgttcgtctagtgcgagactatgcatccgtgctttatttatacctttatatcatttttgttgaatatatgttaattttaattattaaatagactagatccgactgcacgaccatgttccacctggacagtacccacagcagtgataaatgggtacttagtgctcgcttttgcatattcggttcgcagcggttctacctggctgcttacttctgtacctcgtaaaagcgcgctgttgatatcggctggggcatccgcagcattaaggggatttgcatggatgcttgtgcggtggaatcctccccgcacatcgttaggatggacggtaataaggcacaatttaacgtgtgctctgcagaattgcgacgctcaatcgtactgatgtgctggttccacgtcttgcagaatgcttggaaacatgccgatgaaaagagagttgggattgacgaaattcgcgccatttttgcagagttgtattgtaacgggccagttgtgtgtccgttactagcgtacacgtagcggtgaggaagcttagtttagactcggatttagtgagaccaagcagacagtcttgggtaaaatcaactctgttttatgttaggaccagggcggctactcctggtctcatctgagccactcaaatgcatgtcaacgcctgattggctgaaatggtcctccacttcagccaatcccgatgaccgtcagtacacgctaccagtgtactgacttaactactttatgtactgtcaatctacctacttatataagggggcccattacatcaccaccccctctcaaagttgcgcttacgcaacataagcgcaaaaatcgcattttcgcaaaacacccgaagaacaccggagaagacccaggcaccggataagcggcgctcgtactcccgagcgacacacgacgatgcaggcgcagcaagttggtaccgacgaagcctcttcattagcgcacccgccgatgcagcacgcggaggctgacgcgcctctgggacctggcacgttccgcgcggcacagctggatggcgacctggcgccgtgggacttgtacgacttgtcgggcgcgctgcatccggacacgctggacgtcatgaaggaccacttccgccgcttccgcgcggcgcgccagaaggggatcgagggataggcactgcggcagtcgtggtgcgagcatttggcgctggaacaaggagacccgcgaggggcgcggcctcgagacttggcttgcgcatcgcgaggagatgctttgagatcattcgctgagggaacttcggcgcagcatctgcgaggatgcgtggaaagatgatcgcatgtgctacgtgagggtgcgtgaagggtgcagtgcgagtgggatcgctcggccgacaaacgcccagtgggaggcgcagctcactgggcggccgctcggcttgggggcagccgcagacatcgtcaagtacaagcgcgcactctccgacttggcgcaggcggctattcgagggagcgtgcgggaacgccggacgcgccgcggacgctctcgctcgcgttcgccagcacgctggcgcagtcgctcttgttctcgttcgctagcccgctggcgtggccgctcgccgccgcgagcgctttttcgtactcgtggacaacgtccggaacgtcgcgaagaagactggcgcggggctcccacgtatcgtcttcagcaggaaacccaagccagcggactcggtacttacgcgcagccggcactgcttggcttgccggaccacgaccacggggcggcctcgtgcagcaggggaatcttcctgtgccacaagccactcgataatccagcgaatctcgcccgccgagtcaacaatcggtggttgaccttcacggcggtacggcgcctgatggagcgggcacggaagacatcgtggctgctgtgaattggtcttgggacgctcaggcggaagctgagcgagcggacgcgcgcgcatggcgtgcggagcaagtggcgacgcagcttcggcagtcgaaccaggagttgttgacgtctatggagcggtgcagcctggatctcccgcgggagcgggcgcctggctcggacggatcgatggcgcgcgagacaagttgggcggagtgaccgatgcatgctccaccgggggctcctggtggtcagagctcggtacctcagcagggtggtaacggtcgaggcgcccgacgtaaaacgtcgggtgaagacgcagcgaggtcgggatgtccagcgtgtacgcatcgccgaaggccttcaagatcttgaaggggccaatgaccgtggagagagcttgttggcgccgaggttggtcacggcggaggagcggatgccttcggtagatagtaacacacggtcacccatgcgaaatgaatttttattttgcgcccacgcttgtctgcattttccttctgcttgtccactgcagcttgcagtgcgtcccgcacgaaacgtgtgcttacctgacgctgctgcacaaactaggagactgcggagtggtctgcgggcacgccgaggacttcggtgcgtagttagcgggaatagccggttgctgctttgtagctggagcgccagcggggtcaatcagagtgcgctccgtccagtctgcgagcggcgtcaccgcactgcgcagtgcagccagggccttcttcacttgggatcgtgtcactgcattcgcgcttgattcggtcactgacaagcgtggctgcgccggtgattcgaccggcgacgactctaccggcgtcttggtcggcggtgagtcttcagcggcagttcctcccccaccaagcgtagaggcaggagccgccgcgggttggcttatagcaagcatggcgggtacacgcgggtggcgcgcggagttcacgaagaatggagtcatgcccgtcgacgagtgctcggcgttgttcagagcgaactcggtcaggggcaggaatgcgctccagcacgggaacgacgtagcgtagctgcggagcacgacttcgacgacgcggttgacgcgttcggtttgtccatccgtctccgggtgagccgcggtggacatggccagcctcgttccaagcaacttgaacagctccgtccaaaacgcggacgtgaacctcggatcccgatccgagacgatggagtcgggcagaccatgaaggcggaatacggcgtcgacgaagtgggctgcggactctcccgcagtaaccgtggcagccacgtgaacgagatgcatcattttgctgaacctgtcgacgaaaacgaggtctctcgcgcgctcgttcaagtcgggtggaagaccgaggacgaagtccatcgagacccaggcttccgtcgggaccggaaggggacgcagtggagcctgcgacgacagcgatggctttactcgttggcagatctcgcaagtgcgcactcacttgcgcacccccgtgtacaagtgggaccagaagaagtctcgcgccaccgccgcgaaggtcttttcgcgtcccaagtgacccccgatcggagcgtcgtgaaactcatggatgatccgggcgccaaggtcttcgtcattcggcaccaccactctcggggcatcgaaccggtcgatggtgtacgtcagcagggagccatcaagccgatatcgctcgacttggctgcgggtcaagcgcgacagagccttcaatgtcgtctcgcttggagagcggaggtgggccaagatgctggtgtactgcgcgtcatgctcgtacgctgcggcgatctcgtcccgaagcggcatcttggggggcgacgctcgtcaggttcaaccccgacgtcacacacgtcgcacgcgcatcttcatcatcttcgtcagctgcctggcgcttgaggccttcacgtgggtcgtattctggacaccgagacagcgcgtcggcgaggatattgttcttgtcaggcttgtagtgcaccacgaagttgtactcggaggagaaagacagccagcgggccatgcgctgggacagatgcggggatttcgtcccagtccgcagcgatgcgtggccggtgtagaccgcaaacgtctgctctccaagcaggtagaccctgaacttgaccaatgcgtagcgcatggcgaggagctccttgtcgtgcactgggtagttcctttccgccggcttaagccggcgggactggtagctgatcacccgcttacgaccctcgtcgtcgaactacaccggatggcaaagccgctcgcgtcgcagatgacgtggaacggcttcgaatcgtccgcgagcatcaaaacaggggcggatgacagactcctcttcaccgagccaaatgcggcttggtgctcttcgcgccacgaccacgtggtgtcccacttcagcagcgacgacagtggctggattaacttcgcgtagtccttggtgtacttgtgcaagtagttcgccatgccctgccactgacgaagctcagtgggactcgtgggggtcggccaagagcagattgactcacccttctcagggtcggcgcggactccgtccttgctcgcgtagcagcccaacaccgagttctccggagcacagaacacgcacttcttcaagttggcgtagcgcttgttctccctcatcacctggaagacttgctgcaggtgcttcacgtggacttcgacagcgctgaggtcactttcggcgcgactgtgcacgaagatatcatcgaagtagctcggtgcgaagtcacggagcgggcgcagcacatgggagaccatgcggtttaacgtggccggcgcgttcttcagaccttggggcatcaccagccactcccagagcgtgccgctcggagtgcttatcgctgtgagaggtatgtcacactctcgcatgagtatctggtagaacccatcggtcagatcgatggcgctgtagatcacgcttcccgccatagactccagcaccatgtccttgcgcgggattggcgcctgcgcaggtatggtggcatcgttcaacttgttgaacgcgtgaacattgcgccacccgcccgtggccttcttgacgcaaaaggtcgggctggagtgtggcgagatgctttcgcgcacgtgacctgcccggcggcggctctcgaagaagtcgtcgatggcgttcacctggtcacgtggaagtggccacgcggtacttcgtcccaggcgcgaggtcgatctcgtggcgcacgcctcggtccgccgggagctcagcggggatgttgtcggggaagatgtccgcgtactcgcgggcagtttcgtacacggggttaccggactcacgcagagcttcccaggactgcgccgcgaagcgctcctcgcgcgctgacttgggctcggcgttcttgggcctccacggcgtatcctcaacctcgaccgtgttcagcgtatccaccgggaccgcctcggtggtcagacacacttgctcgatctcacctgcattcaggtctcgcaggaagttcttccaggagagtcctgggagaagcgggattatgttggcatcgcgaggcgggctcgcgacttcgatgacgcgcgatcggcgtggagcgccctccacgtactcgagagcgcacaccgactacttcggtgggttctcagtcgctgacggttctcgacggggcttcaggcggcgtcgcttggacttcttctttcgcttcgagcgggtgctcgaagaagacgcatcgctctcgctcgacgatgattcaccctcctctaggtgtcagaggccacgcttgatcacaccggcggtacgcggctgcaccacgctctcagccgcaacatcgttgtgcgggagcgactcatgctcgaccgcctgctcaacttgtgacgggaacccacgctctaccgccgtctcattgtgcgacgggagcccacgctcgaccctcaacatcttgcttgacgggaatctatgctcgaccgtcgactcgctgcgcgacgggaacccatgcgcgaccgtcgacttgttctcattgtgtgggagcacacctcactcgaccacgtgtccgtcatcgcgaccacgtgatgtcatccggacatccttatcattcaacagcacggcgcaggccatgcagagaggaccatcgcccgccctgtgcacaacatgcgtcgtggctgtcttgtccacgacagtaacgtgaggccagtctcttggagccaccaagaggtgcgtgaacacttcacgtacgtcgaagccgcgtcaacgcttgatccaccgagccagccagtcaatctctggctgataccatgcaagccacgggatacccagaatgcagtcgaatgtgtaattcatctcaatcaccaggaaggcatcgttgctgcggaagccgtcgaacgtgtacggcagcgacacctcgcatcgggcgacgcgatgggccttgccatccgcaagcttcaccaccacctcgcccggacccttccggatgcgaacgctcgcagggagcaccgacaaacacgacgcgcggaagaagttgttcgtcgctcctgagtcaaggagtgcgcgcagtggacatcgggcgccggcgacatggaggctgacgatgatcagcctcgagtcgccactcgtagtggtgacattaaaacgtgcatagagcacgggagggctagaaggcccggttgccaccggaggacccggactttcattccaaccagtagggctccccgcacctactggccacggccgtttttttgttgagtggccgggctagcgtcgacatcgacatgcgcgagaaccggagctggcgcgcagcgtcgtatccgtctgtatcgaaagcgggtctgaaggcgccatccctgggcccatcgaggcgactggcggctcgttcgctacgggtgagggcgcgtcggattcgtgaagcgagtctaacgacacttggcatcgcgcgcagcctccagctttgcggcaagctcgtccgtgcgcgcctccgccatacccaacttctaagtgggtaccgtcagctgctgctgcttccactccacggatccgaagttcgccacccactgcttgcgcgcctcgagcagcaccaggtcgagcttggactgcatgagtgcattgttttcaccatctccgctcgactggagctgcagagtctccctctagctggctgaccgcgcatgttgcgccagccggtactcacagaagcggatgaatggtgctcgtcggctgtgcgcgagaacagcccatcctgcgaggacgtgcacacctgcgacagctccaagacattcggtgcaccatgctaatcttctctctcaagcgcctcacccgtgctcctcgccgtggaacgctaggatacgcggagaaatggatcacttacggcctcggccccttcctgttctccaatcgtgactcgatagcgtgttttgtgggattcttagcgcgcttcgaacgccggggcggaaccggatcacctacaatgctccgaggaagtggagatggagctgatatgttcgcgctggcgttgccggaatccgtgggatggacagaatcgctggcagtcgctgcagtgcaggcaggaacggaaccagtggtggcgttgccctcgtcgtatttcagaatgagtgtggacgtggtaaaagccactggactggcgggttcatgttgcgtctctggtaccgatagggcaacatcggccgcctccatggcaggccacctgcgttagtatgccgagtgtcgacgtccgaacccagaaaccagtcttgattaccatcagctggtgatggggttcggctcggatccaccaaagattcatccgaggaaaaagcgaaggggtcatcgtcatctctatgcgaagggcgtacaaattgtcgactatctgcactgaccccggtacagtgcacgccaccgtgaattaggctaccacaacatgcaaacagacgacatgatttctactgtaggcacacgtacacgctttactgcgtgtgtccaccacccatccgcctgggggtatgcctcatgtctgcatcctcagcgcgctgaccgatttgatagagttcatcacgtccttcttttcggctcgtgtatggcggagtgggcgttgttgcacccggtacagatcggcctacaactcccccacctgagagatgcggtgcaccgatatatactctcgtctgtacataaattgatacagatacatcaatcgatcggaagtgtgctgaaatgcgtatcttggtacaaaaaggccagtcacacacgtttcaaatgtaaatcaattcactggcaatagctcatccttccggtcactgcattttcacctttttgtgatattgccctagcagattgttagtagctgcatatacacggtgtgtgtgtgtgtgtgtgtgtgtgtaaaaggcctaccagcgtgaaaaccgtttggaattcacccacattttagtgatatgatctgtaagcttaggctccgcagatctacaagcaaaaccacgccatagagtaagagctcgtgccttgacaataggaaaatctagctctgtagcatagtgcatgccatacatgtaatggaccccatttacataagtaggtagattgacagtacataaagtagttaagatagtacacgggtagcgtgtactgacggtcatcgtgattggctgaagtggaggaccatttcagccaatcaggcgttgacatgcatttgagtggctcagatgagaccaggagtagccgccctggttctaacataaaacagagttgattttacccaagactaactgcttggtcccactaaatccgagtctaaactaagcttcctcaccgctacgtgtacgctagtaacggaaactcacctggcccgttatacctggtagcactttgtagtccttccaacgaccaagaccaagatgagacaagtcctgacgtccggtccttcaggggcaatcctggagcacggtgcctttccccatatcatgcgcgttgagtgggaagctctccatcgcctcgcggcggtgtgcggagaggctgttgtcacttcgctgatgagctcagcgatgctggaacaacagcgccaagctgcccaataattcatggaacgcgagctcgccgacgcgaatcggcgggtcacaactccctcgcgctcctccaggaacgacgtcgtcaaactggagacgtccacctactctggcgtgggcgacgatcggcttccactgaaccgctggttcagtgagatcgacatcgctatcgcctcgcgcattatcgaagtgtcggcggccaaggtcaacttcctactctcccggttgtctgggaaggccgaggagtgggccctcggcaagctcgtcgtcgaccagaacgcgttccctactctggagtcgctccagagtgatctccggctcgcgttcgagccgccccaagacgagtcgcgcgttcgcgcagaattcttcgctctcaagcaaggcaagatgtccatgcggactacgtccagaagacacgacaccttgcgtcgtgcattgtcacccaccccattgacatggcatctcaggtgcatgtctttgtgtttgggaagcgcgaagggatgacacggtactatctcacgagagccgaaccttcctcgctcgaggaggcatttcccctcgcgctccgcgaggactacgtggtggcggcatcgtatgcgcgtggtatgccggaagtttctcgtgtgtccgcgcccgagcccatggagatcgacgcatttgaggcgtcgggtgattgacagcgctcggcctatggtgggggaggaggtcggagcgctcgtcctctgacctgcttccgctgccggaagattggacatcgcgcagcagagtgccgcggaagaatcggcgccggaggtgccgcgggcacatcgagagccgcaggcgcaggaggcgcagcagtcggagcctgcatgcgggccaggaggtcgagatgaccctgaagcacagcctgctaacgctgttgccccccgagctcccggccacgctgctcatcgcgatcgcgatagtatcgcacccagccctccagggccgcaaggcaattccagacctctagaggcacctcgatccattgcgtccgctcggcgagctggtcgagttcagtggcagtccggcccagacgcgcatcaacgtcatggatgtgatcccggaggtggccagcctgctgccgcgcctccaagagctcatcttgagtcgcaaaggcccccacagcggcctccaccggctctgctcgatgagcatgggaatctacattaccatgtggagcgcctcctagcgaacggcggtgccggggtcaaaaccagtatctggtgaaatggcgagggtaccctcactccgagaactaatgggagtttgaggtgcccctccgccaagactgaccagacgtcgtggacgcttttgactagcttgatcaccagtgccccgagggctcaaggccggcacgccggccgtcccgcgcttcccggcaataagctgggaagcggctgggtcagccacattgctccgaggctgaccctgagccacagcgttcactccctcgcgggaaggagcggctggaatgctcgaagaagcgaagcgcgcagcgctaaactgggtctgcggctgggcgagtgtcgagaggctgcgcttggctcggaccttcgcgaaatcgaagcggagcttgcgttcaatgcgaacatccacttcactgaagctggctcggagagcgtccatggagctgagctttcggctgggctcggcccaggactcaaaccgagcctcgtactcaatcgagtcctcccccgggctgagtaccaccgggtacggccgcatggcgtgcaatgacttctgctgggcttgcagccgcagcctctcgcgatactccacgacagtcatagactgtggagtgatgagtcgctctcgcagagacgtacgcagtgcaagctcctccggagtacgggccgcgggcccaatggcttgcagcgcaagagacggttggaacgcctggcggcgcgcctccgcggtgtcgcgaggccggaagccgtagtcggcggtgctggggttcagcggaggccggagctcagggcgctgggagcgcatgggggccatctacgccgcgacctgctcggactgagcttcgcccaaacgattggaaatgacggggcccaggagcacgtcctcaccacgaggcggcaaatatcgtggctcagtgagcgcgcgcagctcgttgagaccggagaagcgttcagggtaacgggtttggagttcgcagcggtggtcgcggctcctctctcgacggcgcagcgcgctctacagctgggtgcctcggcgagcgcacaggagacgtgcgcgctgggcgttcttgatcacgacggctcggagagccaactgtggccggagagccttcttcacggcgtgtcgacggcgtgggcgaagcatcgaggcggctcagggagcgtcgcgtggatggggacgcatctcctcggttcggagaacccagtatggactcgtccacctcaccctcttcaccaacgagttccctagaatccatgatctggcgggttggtgctcgaggagagctggggcttgcgcgcttcaagctgcgcttcagatgttgcgccgcgtattactcggagtgtgtgcgcgggcgctggcgttcgcggaggtgcggaggtgcggaggcacgcagtgcagcagcacgagaggagcgaggctccgaggcggatctcgcgagaggctgtctgcggtcgaaagaccaaaaggctttatgacttgaagtcatgtgagggcgtgttgcaccgagaagttctcagagaagtccacgcaatgtggattgactcgttcgagaagggggcttgacggaacaagacccggaggttgaccgttaagcgtgaacacccgtgtccacggtttggtgggggagggtgtaacggagttacccgaagggttacgaagtggattcacactgtatgacctaaatcagtaggagaatcagtacatggcttcagagccactgattatgcatatgactagggttcactatggtagatagtgaaccggatacatttacaccgttggcggcttgaccgcgctaaagagcaatacactcagtttaagatttacacagtttagagttaagggttgactcttggagtccgtaaggactcgtacgttctggcattagaacgagctatctcaagctgagactctgtgagtctgttacgtctttctctggcgctaaagctacggcagccccgctgcaacccgaatgacagcctcgtgacgcccaatgtaagtgtagcttcatactgtactggtacggtatctttaaacaagttcgcagtatcatcctacactttacactatagtatgttaagatgttatcgagctcgtacaatgaagatattcagatcgggccaactagctgtgcgattgctatcactgctgaacattcttatcagatcattcgactatttattgaatagaaattacgtctgtcacttctggcagaattctgccataactcgagtagcagcttggccaactcgcgatggccctcgatcaagtcggcctctaacttgtcctgatggtccaccagagcgctgatctcacatttcttgcgcttattcgcgtccttctggctcttctttccatcctcagtcgtacacgagagctggtccagctcgatacgcatggcgtcagcacgcgttgagaactcgaggaagctttgtgtcgtcctgcgattcaccgcgccccgcaagctccacgtgcacctcgcgcgtgaacttctgctgcaagttgtcctcggtcgcaggctgcgcggccaagatgcggcgtagacgaagatcatcagattagcgaacgctcaaggcgcgggtggcggcgtgtcgatcaattatgggtcgcccgcggcgactgtgggtggattggtgttgctgagggaacttcgtcttgacgacggctgacactgcatgtttaggtaggttttcaccattaagcaacaccaggcccccgacctcataactttcaacattgtctctgcccctggcatctgcaggttccttttgcttgtcttggctctcagccattgcgtcacgcacatgtcgtaagacactcagacgcatcgacaagaaagcgtcaacctgttcacaaacagtagccgggctgacatcggctagccaatcagctaaatcggcttttcctcccccatcaagcccgaggccaccacgtggcggcgtcagcgggacgcggggatgatacaagctgttcacgtagaacggcgtgtagcctgtcgaggcgtgcacggcgttgttcaacgcaaactcaacgagtggcagcatggcgctccagcgcttcaacgtctcggcgcaaatgctgcggagcacgtcctcgacgacgcgattcacgcgctcggtctgaccaacggtttacggatggtctgccgcggacgtctagcttgatgccaagcaccgcaaaggccgcgctccagaaattgctcgtaaagcgggggtctcggtccgagacaatcggctcagggagttcgtgttgtcgaaaaacttggtccaagaacagcgttgctgtacctttaccatcgatggtatccgccacagccgcaatgtgagccatcttgctcaaacggtcaacgaagaccacgactcctgtgttgcacaccacgtccgtaggcaggacaaacacaaagtccatactcatggattgccagcagcccgaagggacaggcaaactcgccaacggcgccgcagcatgaggtgaggacttcacgcgctggcacgtctcgcacgtgcgcacctaagtgctcgtccacttggacatcttcggccaccagtagtgggtgctcaccgagctgtaggtcttctcacggccaagatggccagccagcggcgtatcgtgtgcctcatagaggatgcggtacttcagatcctcatcttgagggatgaccacgcggggcgtatcctcggggtcggtgttgtagaacaacaggcctccatcgagggactagcggtgtagccgcgcgcgcagccgcgctgacaattccatgtccgagtcttgaaattccttgctccctagagccttcagcaacacgacacaagtgtcgtccttggcatcagccgttcggatcagatctggtaatgacgaagtcacggtcgttagatgagcagctcataatctggcctgcgcgaaagcgcgtccgcaaggacattctgcctgccaggcttgtacttcacctcgaagttatactccgcgaagaaggacagccagtggtccatcctttgcgagagatgaagcgactgggtcgcagtgcgtaacgacgcatgatccgtgtaaatcacgaacggctgagagcccaacaggtgcaccctgaacttaacgagcgcatacttcatcgcaagtagctccttgtcgtggacaggatagttcttctccgcagccttcagctcgagcgccaccacgcgctcgcgcccctcggcgtctgcttgcagcagggcacagccgataacaaagtccgaggcgtcacagacgacactaaacggacgagcggggtctggaagagccagaacaggcgcatgaaagagactgtcctgaatagccacaaacgcatcttaatgctcggtgtcccgacaccactccgcattcttcttcaggagattggagagtggccgagccatctcagcgtaattttcgctgtacttgtgcaagtaattggccaagccaaaccacttgcgaagatccttctggttcttgggaaccggccaggcaacaatggccttgaccttgactgggtcggccctcagaccacgcttcccgatgaaccccaccctaagaaggggatctcttccgctccgaagatgcatttgtcaatgttggcttacaacttgttttgacgcatgcattcgagcacagtacgcaggtgctcggcatggttctccatatcagtctttccgtactccgcacgactgtggacaaagatgtcgtcgaagtacgtttgcgcgtacgcccgatggggcctgaagagctgcgtcacaagacgattaaacgtcgctggcgcgttcaaaagcccttggggcattaccaaccactcccagagcatgccgctcggagtactcaccgcagtgagaggaatgtcgctcgtcctcatgagcaattggtaatatccatcgaccaagtcgagcgcactgtacatcgtacatcctgtcatgttgttctgaagaacatccttccgaggaatcggcgtcttcgccggaatggtagcggcattcagcttgttgaaagcatgcacgatgcgccacttgcaattccgctttctgacacagaacgtcggcgtagagtgtggggacttactatcacgcaccatgcccacctcgtgcattgcacgaaagaacgcgtcaatgacgtcacactgctccttcggcaagggccactgcctcgtcacgcagtacttcgttcccggaacgagatcgatttcgtgttgaacacctcgatccggaagcagccccgagggcggctccttcgagaccacgtcctgctaatcctttaccacttgatacaagggatccgacgggcccttcaggatcgccgatccgctccgcgcattcagcgccttcttggtgtcttccaggacagcttcatccagaagcgaggacgagttcaactcttcttcgggtcgtatgaccactacctcagccaagtctccagccttccaggcttcgccaaactcggccaaggacatctcgtccagctccaggagagcggacagtgagggcaagtcgtcgaggttgatgcctccgtcgacgtcgtccgtcactccattcacgagtggatagagctgctcgctctcgcgtggagccttacgcccttctcgacttgtgagatcgcagacgccttgcatctcgcagccagcgctttgcggcgttgtctcctcttcatggacatcgtccgccttgaagagctccgtgatttcgtgtgcgtcttgacgccaggtggtgccagtgtctttaccgacactcagcgaagagctgcacgatccgcagcctccactcagtggattaagtgccagccacgatcttcatccgggcaaagccccttgttcttcggcgtcgtgccgaccgcgccgtcgctggcacgcagcaggacgccgccctcagacgcacgcttgctcagcggaattagtgccgctccacatccttcaacagccgggccgcgcccatggctcctcggcttcatgccgattttgtcttcacttgaatacagcagggcgtcgccctcagacgcacacccgctcagcggaattcgtgccgctccacctgccgcccgcgagccacgctcggaaagctcgttctcgacatactcagtgtccaccaactcggaaactccgatgtccagcacattgaccgactcggtccagtgctcgcgccagaagcgcttctgcttcctagcagaggtgggttcatgactcgcaaatgctccgccaggagagaagtgcgtagcaccaagggtcttcaacctccaatcgatccaaggctcgtggcgttccagccccgccataccaaggatgagatcatatctcgaatcgaggtctaagatcagacagcgttccacgctatctaaatccaaaaccttcacgcccaggtccacagggaccttaggcatcgtgacacgagacgaacagtgacgatgtcactcccgcgcgctaccagcgcctcagcataaagctgacttccgttcatcgtagaatgccgggcgtagttacccgacgctcccgaatcgatcaaaatcgtccatggcttcgggacgcccttcacccaagcttggacaactagcaagcccggcttgcatacacgttccgtgttagagagtacggctctcttcagggctaagtcctgtcgacctccacctcgccgaggctcaatagaacttagttcttcccccgtaggtcgccccgcgcctactgggacttctcgtttccccgagacaaaccagagccctggcccgaactcgaagagcggcttgacgaagcctggcgctgatggcgcagcggacacccagcacgaacgtgacgggagtcaccacagatgaagcatctgcgcgctgctcagcagcacgaagctcggcttcttcgtcttcagcatagctgaggtccatgcgttccggaccattcgacgcgctagcgtaagacgcattccacccaagtctcgacgacttaaagttgtgttccgcattcaatgcgacgctcacagcctcttcaaaagagctcgggtgggttcggaacacctccgtcctggcaatgccagtgcgaaggccctccataaacaccgtaacggtgactgcctccggcaacgggtcagcagacatccctgcaatgatagttctcagctcttggacatagttcaccaaatccttcttgctctgccgagtggccaggaagcgtgagcgcatgcgatacgcctcgttaggcggagcgaacactcggaacaattgctgtttcagctggtcccacgtcgggaaggccacctcgaccgacgtcccggacgttagtgcccactctctcgctcgcccaccgagcttcgagatcgctagtgccacacgctgcgactccgtccggagtagagctgagctcatagtcatctcaacctcacgggtccaaagcatcaagctttcaccctccttgccttcgaaggtcttcacgcccaacatgagcggcttgggtcttgttcccgcgtcggacgacgaagggggcgcttgggacgctgcggcagtcgccatcctctgctgggggtgctctagaagagcattttcgtagcttgaaaacgcctcgagacgcgcgttcaccgcgtcggggccttgctgcgcaagttacgtcacgccctccgggcccagcaaggacataagctttttaagcgcattctgctggttcgggggcaagtgagcgaactgctccattctccacagagggtcagtctataaagagtcaggtgtcgaattgactacgagggctaccaagtgcagcggggctgccgtaaatttagcgccagaggaagacgtaacagactcaatgagtctcagcttgagatagctcgttctaatgccagaacgtacgagtccgtacaccttacggactccaagagtcaacccttaactctgtaaatctatgaatgtatttctctttagcgcggccgagccgccaacggtgtaaatgtatccggtttactatctagcatagtgaaccctagtcatatgcataatcagtggctctgaagccatgtactgattctcctactgatttaggtaagacagtatgtacccacttcgtaacccttcgggtaattctagtgtaaccgtgttacacgggtgccgctccctcttttcgtgagtggacactctccatcggtatagtgtgtgcttaactacgtttttgttggtgtctttggggcgaccccccccccctataccatttactttttaccaagtggatacatcaatttttggaatgggttagggtgatcatttagaatcacgcgcatggggggccgcgaaaacggaaaaatccctgggtttagcaacattttgagcgttatcgtggataaaagaatagctcaattccgacgcgaagcgtcgtttcattttgttaaagacagcaaagccaggatcccaaattagcaaacagggaaatccgagctttctatggcgaccctacaaaagcgctaaaactgcaaactttgctggattcgtgcccgttctctagctccttaagccccctatataagcccctaattccacgaaaaatctgttagggtttatcgcgtcgtaaaaaagcctcattgtaagaagtgcacgtgaaatcaatcgggtacacagtaccgggacaagcgctcaacttcaacgcaatgacgtctctcctcgcacttcatgggtcgaggccgaacccagtggtgctggccaagttgatgctgaggtcggatgacggagaattcggcgacaaccgcgccgttccattcgaggagcagtacgcactggcgctaacgacttcgttatggccgtgaacagcgacgccatcttctgagatgtggatcatggccgaagtggtcgatgtgttcaaccccgcatcttcggacaggacaggacgtgccgtggcagtggcctaaacgattcgcgcttgcgcaaaaacagctcgcgccgacgaactcgtgtacgctgctgctgaaggactgccgcgcctacgctgaagcttagacctgtttagtgcagtgcacgaaagtccctacaaatgcactaaagaacttttgtgcacttttggcgcacctgcacacaactgatgctggacattagcgcgtgcactaaagtactttagtgcatttgtggggactttcgtgcactgcactaaacaggtctactgaagctggacggcggtttgcggctaagtgagcgtatgagcgtatgatggaagctggctcacgagcagcgctacatggctatcccgattgctggtggtcgtgtgatttcagccaatttgcagattcgagcaaaacgccgaggttttcgaaggcatgcgatagtacaagcgcttcttcgtgtacgagggcgtgcatgataccaagtacgcggccgatacggtagctaccggtgtggctgaggctgaacactggtcggagagtacttgggcaccgcagcgtttgaggcaagcagctcgatctgccctgagtgcacgatggtgtcgaaggccgatgcatgatggacgtctactggacgactactgcaacatgacggtgctcaagcacgactaggtgaactgcgagcactggatgagcaagatgctgggccactgcggcgaggcacggcataaaggataagcccttcgacaattggcgctgcgcaactaggcggctggcttcgtgatggaggtgaacccctgcgaggaccccgtctccccgcgtatcgagggcgacgactgccactcgtacgaggccgatgacgacaagtgtgtgttctacaagcgctcgatcccgaacaaaatgttcacatgcgacttgtggctgctggtgtgtccgctcgcaagtgttgggacactgtcctatcggagtcgcgacaagcagtgcctgctgggggcttagggcgttggcacaagcgtcaatgtgttcaaccaggcgctggccattccagaatttgacgggtcgcgagcaagtgtctgccaagggtcgcctccaaggatctccgggcccttggcctccctgggggaatcctccttagggagcccaggaatgaacatggcggctgcagcgacggcttgcgcgtgcccatgaccgacgacggcagtcggcacaggaggagctcgcgcgcgacgacggtgattgcgctccaagagggcggcgactctatgggtcgttgccacggtggtgggaggcccaaccttcgaccactctttcaagctcgcggcaggcgaccgcggttcaagcactcaagccacgactccacggtggcatttgggcggtgtccttcgggatgctgccgtcatccgatgttgttagagcctaggctcacgcatccttcagcacgcgccggacgaacgcgattaacgctcaagtcaagtatccatgggacagcggccgacggccgcacaacaggaggtgcaggacccctgtcctgtatctgccgacctcgtgggtggcgagtacgaaccacctgacctcgcttgaggtcgcgctttgcactaattttcagactctcccatcagactctggtccagagagccccctccctagtgacgctttgcacaggtgaggcccccagtctttagtagtcgttagcgatcgtattagctaagtgacaagaatgatcctcaattcaaaaacaaacaaaacaaccaggccctggtcaacttcaaggttatttagtcaataggtgtcagaaagtgacgagcaccaatagcgcatgtagcatgaggaaagcttcacgggggcgagatgcagcatgaaagcgtgaacgttgcaaggacagtagcagaaaatcgaagtagacttcacacccaatatttcagagcttccgtgtacagcacgacttcgtacgtatcgtactccacacagaatttttttcaatacactagtttgcaaatctgtctatcccagtatgtatgacacgactcaaattaatggcttctcaaacgaataggtactagtggtcgaatccatattcacgtacttcagtatctacatgtagtgctagattttttttgatcatatacggaactgatcagaggtgtcttatcttggttttgtatggacaaaacatatgttacggcagtgagcggagcgtagccattgcaaacccgcgcagggtgcccgcgaagcagggctgcacggtatttgcggaggcgggcccagcgacgagcattccagcgaacggacccgttgccgcaactcagagttagttttcttcatgcgggggtctgggggtgcaacccccagaacaccattcaggagatctgtcaaatcctgatcagttctgatatgtaccaatcgggaggtaacccatgtagtataaggatgtcattcctggtgtggaagaacatcctggttatcgaaaactaaaaggagcgaagatgaacggctaaaaccgtctaactccgcaacaatgttagcaaaatcacaacattcaagtagcaactccgtacacagccagtaatacaggtgagtgcttcgaatggggggggcgtcgcccgaaattgtgcaaaatctagggcgttaccccttaagcaaccgcccgcggatgctcagctagtctattctaagtttggtggagatttctggtcctaaagtggtgtacaccgccctcgtcgtgaacggtagatcccctgtacaatgattatattctgcaagtattcaaactaatatctaaaagagctgtgatagtggtagtcctcgtgcggtggctgcggagatgcaacttgcattcgatactgttacgatccaggtccggtcgatccggtgttcgcgcttcctcgaggaccttgccgctcgattcttgccgcatccgccaccgataaggaagacaggagtagccaagtagtgtaaatgcacaaatacacaacttgtttcctttgcttacgctgtcctcgccctcttgcgcttgaccctgccgaattgagactgagctcctacttgctcaatgcactgtggatgcagctactctgccaaccactcgaactacttgaacacctgtctgctgctctgcagcttctcctcacttgcctccacgactttctctctgcttccaatgcctcaccagcaccttcgctctctgagacgaccaccaccgttgcgccaacggcgacaaccggaggcaaatcataacacgccctctccgacgcttgacgtagcagttggccgccatccgtaaaggccgtgttcccccagcgtttcatctgctccttaaaataacccatcgccgcccaaaaacaatggtggcgctccgatttcatttatcgcattacaataggggggtcagaattagctttttcgccgacatttttcggccgatatgttcaccataaaaaatatggtcagccgacataacatttccctaaatggttgagcctttttcgacttctggtgaccttcactctgtttaccttgctaaatgtatacgcgtcgttttacacaaataccgagcacgtgcgtcgccatgcgcggagctagccggcgtcgacggcgctcttccggacgctcctgcgccgcgcacaacgcggactggagctagcgcaagctcacgcgcgtgtactgtggtgctgcatggtgccatggccggctgacaagcagcgccacaacgggccatgccaccttcctggcctccacggtctgctgcgccttctgggccatgcgttgcagatagataactggctcccaccttcctacgtgcgtcctctacgcagcgctgctgtcgcagaggcgcccatcgccagcttgctgctcgagccacagggcacgcgcagcaagctgcagccttgcacgtctacatgtagataagctattcaaagaatgaccggtcatttcatatctgaccggggtgatattttggaaatggttcaattttttcgggggctctcaattggcgatattttttgtatcatttgccttaatgaggcatttcggtcacctcgtttttcttagcgctacttcagagaaataaataggtggtggaaatgatcgattttctaaaaacggacaaccctctaagagcgctgtccgtttagaaaaatgatcgatttccccccgccaatttatttccgctcaggaaaattttcatgagggtcccaaaaaatcgtctccatgtccaagtagaaaaagcggccccgccgatttattccgcacaaaacctaatttctttcatatcagtattttatgtaggtcgtatctgttgcacttcacgcatattgcgcattttgcggaagaaggccaccgacgtccacaacacacagcaccgagccagcggcaagtgaaggtgacgcttcagctccagacgcgctgcaaggacgcgtgaccatccgtggagatgagatggatccaagtctgtggtccccagagagcacaatcgtcgtcaagcccggaggttcaggctccgccagcaaagaaagcaagacgctcgaacgctcggccgaagtcaaggacacagaaaacgaagacggcaaccaagaagagtaaaaagaaagcgccaagaagacaccaggccccaagaagaagacctccaccaagacgaaagctgctgtcaagtcatcgtcaaagcaagacaagctcaacctacctccaatgcgctggacacttgccttgacaactcttgcgatcgagactcgcttcaagaacccacgcattttgaataagtttgcggtcacaacagcgggcacacagctgatgcgcgcaaagtgggaagccacggtccacacgttcctggagaaggcactgattgagaaggcatggggtgatggagggaccccgaggtgacgatagagcatttcaaaaacaagaccaatgctgtgcgcagcgcatatcgtgctagacgtacgcgtctactcgcaaccagaaaccaagctgttgacgctgctggatcggaagacgaggaagcagagcgcagatacgcggagatgcccaacaatttctttatcgaggattcggaagacagctgccacacaacctgacgtgtgatccgatggctgtaaaccccacgtatcgcaccgctcttggaaaggagctcaccgctttacggccgcttctttgcgatgtcttctcgggaaaccccgggtgcacgggagagccaattctcgagccaggcgcgctacgtgaacccattgagtgtgcgagtgatagtgatgaaagcacggatgcacgtagtgctggctctgacgacgagtgctccgattcatccagccaggcccgttccgaagctaaatccaacgccaaggctcactcacaacaaaaccgtccagcatcaaatcgacctgttgacgtggtagcggatacgcttcaagctcggttcggttcaattgaacgcattttggcaagtcgccaagctacggtgccgacaactcaacttgccggggacatgaaccaattagtcactaaactgacatcatcaattgacgccgccactgccagccaagctgcatttatggagatgcagcgtgacgtgcaccagtcgctacgtcaaagcgccgaaattcttcagctgatgtccgcctctgcgttggaagtttcgctaaaatgaaagagcaggtatgtgggtttagcgtttgaagcaagacttatcaagtgttttgcagccataagaccacagactctctttttaggtttacttgttatcgtggcggtaaaagcgttccatgtacgcgttccgcttcgcctctcctaagttaaactcattttcagttcgatcccagtggtggtcgaaggcattcattgcttttcttgctttttcgcgtgattccttgtcgttattccacttgaacacctctttgtcaccaatgtcgacaagtaaattgtgcagcacagcagcagcacttatcatccgagcattggttgtgtgcgcgtgtctgtctgtcacgccacgcagcactttgaagcgccccttgtatttaccgaacacgcactcaaccagtatgcgggtcgatgagagatgaaagttgtagctgctcaacattaaaatcaaatgttagttatgtataaaggaaaattcaaacaagtaatgcggttaccagcgctgttttcttgacaagcgttctccgcgtctttcatcgaacggaaccatgaggaacggccatatcttgaacccagcgtcagctaaccagttaattccaggaggacacaggtaccgcgcgcggggcccagcgcttccgattggttccacatgaattgatcggagttactaccggagaaaaccccaaagtagcgaaatttaccgcggaaatcaatagcagccaaacaattataggaatgattcccacttttgtcgtagaagcccaataagcagcatacggggttagtatgtgtcggttagtacccaaacacagcattactgaccatgtgatcccgggggcgacgcgtgtgaataatagtgccatcaaaaacgcatgcaacatcaggaaaatcacttccacgttggacgaacccctccactaagtcatcccactcatctacagcactaggagctggaaagtaaatgacatcgggcatcatgtcatacagcaagtcttctagcctcttgatgtaaacaccagcgaccgtccgtgacattccaagttgcgcagcagcacccccaatcccatcaccatcgatcccactaccgttgccgtaatacgtgaacaagacagcgaggccgatatcaaacgcgtactgtgtgttctgcgcagggaaaccatatttttggtagtacaatggttccagcaacgcaccagtgcgtcagataaatcaggactgcaacgcaacgtcttcttgtacgctgtccgggaccgttgggccttcagcgtcgcaaggaagtcggtacggaccacaactttttcctggatgggtcctcgaattgaccgaccatcaagttatcccagagcgacagctagcaagatgtacagcagctccagaagcacgatttcttccactgccacatcacctctctgtctttcatcgatagacatggcaacggcgctctcatcgccatcgtgtagttgcgcaaatacatcgaggtgggtggcaccaatggcgtcctccgagctggtcttgattgcatccagcaccacaggtccactcgcggaagcatcggagctgtcatcgacgcacatcgcgcgtagtccacagttggcatcattacaagcagtctctccaccgtctattagccttactcggctgatagagccatggctggagtcttctattgtgcacaccacaccaaaaccagtattatattagcaggcgcagcttcaatacagcccagaagatcacgtaccgaagtcgactgcgtactgcatccgggtggacgcctggggaggccggcgcgctgccctccaagttggtgtcttcctccatcttcgcccgtgatttctccttccgcaaaaaaatccggtaccgctcaaaagaaagaggtgccgcaccagtttctttttgccgtattataatgaggcgtttttgacacctcgtttttcttagtactacttcagagaaaaaaataggtgaaaaaatcgattaattttctaaacggacaacgctctaagagcatccccaccaactggaagtaaaatcgggagtctacagtgccaatttaattcgctgtctccgcgccgctgagggagtaatagcaaccccaacggtgatcctatttttcattctaaaccgcgcgtaacctattccctattcacgtcgtgcaggtcgattttggcagcgtcaaacccataagcgggactcacatatccacttgttgttagatatcgccagatagcgctgccaaaaccggttccaaatttggcatcgtgtataggatcggccaaacgcttcatacaaatttccaagtgattcgtttgcgcatgctttgcttgatttagcgccctgcacaattttatagggttaggggcaagatagctctaggaccgagtttagaatcaccgttggcgctgctctgtgggtaaatcagcacctgatattacatgcatcaatacattgccacgccgaaggacaaagggcccacaaatgaagctgaagggccgttctcgttgtatggaagcgcaattttatgaattcctggcacgccatacagcatcgctccgttcttgccttgggcaaatttcgcccaggctttattcgaattggggataaatcgctgatttagtacgcgcggtgcggtgaatttcggagtaaatctgctgtttgaccgtcagcggtggagatgctctaatcggccagggtgggcactgttccttgaggcctgatgccgaatttctggagcttgatgcgtggagcttgcttgcttctttctgggatgaattatttggacaaatgagaggtcaccaaagtttctcgtgcaactaaggcctaatttgttctttcgcgcatcgcagtcgatattaatgttagtcgtttcaacttgttggggcacttacgagcaaacgtgactcacgcacacatggggctacaggacctggtgttggtctgcgagcaacggctttgcagtgcaccattcccacggtggccgtggtacagtagcgcgccgatgcatttactatctcgattgaggacgcgattattagttcgcaatctcgtttagtcggcacgcaggggaagctactgcgcttgctctccgaactctaactctccaactgcagcgtccgatggcggcaggcagccacacaagcaggcggagagtgagcagcgttgttggggccgtcgaactacgttcaaagaaaacaaatcttgcgcgccgcggcccggcacagcgaatttatcccccaccgtgccgacaatacactgtagcggtggttaaagtaccgagccgcgagcgacaggcggaggtgcgtggcgtgccatccagcacatgctgccgggcgagcttccgctgtccgttcttttcgctgtcagaggtcgtttgtattgtcgtcgatttggttagtcgccacccggggtgcacatccccgtggcatggatcggcacgtggtgtctaaagttgcactgcaacttggtacagtgtggctattagcgcaccgaggtcagtcacgcgggtcggccggtcgtgagcaccgagtgtcaattatgccaacctggtgagggaagcgaagcaaaggtggtcatccccccaagcttcggccgtagcatctggcattcgagagcaagcacgcccgaccgtggacgccaactcaacaaagttggcgtccgttcctctgtccttgtagcggccggagatcccctgggatcgctcatgcacgccgccaccaccaccgctgttgctgctgctgccgccgcgctctctcggtcattatccaattcactcgcttcgtggcaggcaggcaaccaacgaaccaactcgacaaccgaccgatcgaccacctttagctcaagcaccacctactctccaccgctcagccatggtcaacgcattatccacgatcgctgctgctctcgccgcctccgccgtcgttgcctccggtgcgtccatgcgctccgaggcggacgccatgccatctggctcgtggcccgccagcaagggcaacgtctacctgtcggagccctacaccgtcaagaagggcgaggtgttcgacggcggcatgaagacgtaccagcgctcgaacgtcaagtgcggcggccaggcagagagcggctggcagaccgccgtcttcatggtggagccgggcgccacgctcaagaacgtcatcatcggcaaggaccaaatggagggcgtgcactgcgagcagagcggctgcaccatccagaacgtctggtgggacgacgtctgcgaggacgcgctgagcatcaagggcggctcggccagcagcgtctccaaggtggtcggcggcggcgcgcgctcggccgacgacaaggtggtgcagcacaacgggctcggctccgtctccatcgagggcttctacgtgcaggacttcggcaagctctaccgctcctgcggcacgtgcggcgacaagtcgcgcaaggtcagcgtcaagaacgtgtacgccgtcaacggcaaggtgagcctcgtgacggtcaacaagaactggggcgaccaggccaccatcgagaacgtcaagatcaagggcaagaaggtcgacgtgtgcgcgtggtcgcagggctccacatcgggcgagcccaaggagctgggcgccggtccgtccgggtcgctctgcaagtactccaccagcaccatcacgtacgcgtaggcgtaggagggtgcgcgtggtgtagtcgagattctagacatggtgtgagagatctcttgtggcgtccgtatcctatcctttgacctacaaatattagatgttgtttgatttggtttggtctaaccattcggctttcgtgtttcgaacctgagaaccatgctgctttggtggctttgtcatcgttcgactaataattacgcgaaatattaaacactgtaaattcgtgtcgactgtaaaaacgcaagcgcgtaagttgccgccgctgatgtaatgaatgctaggcctgaccaatcgagtgagtcaaagccagcagaccacaacggcgcatgcagtgttcgctgttgaggaagatatgtgttgcgagcgcacaatgtatggaaatcttgcgggtgtgccgggcatcaaaccgaggcgcttcaatgtccgtttgtgtttgagaacgtcgagcctgactgtgcgactctatctgcaatggctgtgcgtgctttttcgcgcaaaccatcgggcctcgaacgcatggagcgacagagccgaagttacctggtgttggtctgcgagcaacggctttgcagtgcaccattccacggtggccgtggtacagtagcgcgccgatgcatttactatctcgattgaggacgcgattattagttcgcaatctcgtttagtcggcacgcaggggaagctactgcgcttgctctccgaactcttaactctccaactgcagcgtccgatggcggcaggcagccacacaagcaggcggagagtgagcagcgttgttggggccgtcgaactacgttcaaagaaaacaaatcttgcgcgccgcggcccggcacagcgaatttatcccccaccgtgccgacaatacactgtagcggtggttaaagtaccgagccgcgagcgacaggcggaggtgcgtggcgtgccatccagcacatgctgccgggcgagcttccgctgtccgttcttttcgctgtcagaggtcgtttgtattgtcgtcgatttggttagtcgccacccggggtgcacatccccgtggcatggatcggcacgtggtgtctaaagttgcactgcaacttggtacagtgtggctattagcgcaccgaggtcagtcacgcgggtcggccggtcgtgagcaccgagtgtcaattatgccaacctggtgagggaagcgaagcaaaggtggtcatccccccaagcttcggccgtagcatctggcattcgagagcaagcacgcccgaccgtggacgccaactcaacaaagttggcgtccgttcctctgtccttgtagcggccggagatcccctgggatcgctcatgcacgccgccaccaccaccgctgttgctgctgctgccgccgcgctctctcggtcattatccaattcactcgcttcgtggcaggcaggcaaccaacgaaccaactcgacaaccgaccgatcgaccacctttagctcaagcaccacctactctccaccgctcagccatggtcaacgcattatccacgatcgctgctgctctcgccgcctccgccgtcgttgcctccggtgcgtccatgcgctccgaggcggacgccatgccatctggctcgtggcccgccagcaagggcaacgtctacctgtcggagccctacaccgtcaagaagggcgaggtgttcgacggcggcatgaagacgtaccagcgctcgaacgtcaagtgcggcggccaggcagagagcggctggcagaccgccgtcttcatggtggagccgggcgccacgctcaagaacgtcatcatcggcaaggaccaaatggagggcgtgcactgcgagcagagcggctgcaccatccagaacgtctggtgggacgacgtctgcgaggacgcgctgagcatcaagggcggctcggccagcagcgtctccaaggtggtcggcggcggcgcgcgctcggccgacgacaaggtggtgcagcacaacgggctcggctccgtctccatcgagggcttctacgtgcaggacttcggcaagctctaccgctcctgcggcacgtgcggcgacaagtcgcgcaaggtcagcgtcaagaacgtgtacgccgtcaacggcaaggtgagcctcgtgacggtcaacaagaactggggcgaccaggccaccatcgagaacgtcaagatcaagggcaagaaggtcgacgtgtgcgcgtggtcgcagggctccacatcgggcgagcccaaggagctgggcgccggtccgtccgggtcgctctgcaagtactccaccagcaccatcacgtacgcgtaggcgtaggagggtgcgcgtggtgtagtcgagattctagacatggtgtgagagatctcttgtggcgtccgtatcctatcctttgacctacaaatattagatgttgtttgatttggtttggtctaaccattcggctttcgtgtttcgaacctgagaaccatgctgctttggtggctttgtcatcgttcgactaataattacgcgaaatattaaacactgtaaattcgaccgatcgaccacctttagctcaagcaccacctactctccaccgctcagccatggtcaacgcattatccacgatcgctgctgctctcgccgcctccgccgtcgttgcctccggtgcgtccatgcgctccgaggcggacgccatgccatctggctcgtggcccgccagcaagggcaacgtctacctgtcggagccctacaccgtcaagaagggcgaggtgttcgacggcggcatgaagacgtaccagcgctcgaacgtcaagtgcggcggccaggcagagagcggctggcagaccgccgtcttcatggtggagccgggcgccacgctcaagaacgtcatcatcggcaaggaccaaatggagggcgtgcactgcgagcagagcggctgcaccatccagaacgtctggtgggacgacgtctgcgaggacgcgctgagcatcaagggcggctcggccagcagcgtctccaaggtggtcggcggcggcgcgcgctcggccgacgacaaggtggtgcagcacaacgggctcggctccgtctccatcgagggcttctacgtgcaggacttcggcaagctctaccgctcctgcggcacgtgcggcgacaagtcgcgcaaggtcagcgtcaagaacgtgtacgccgtcaacggcaaggtgagcctcgtgacggtcaacaagaactggggcgaccaggccaccatcgagaacgtcaagatcaagggcaagaaggtcgacgtgtgcgcgtggtcgcagggctccacatcgggcgagcccaaggagctgggcgccggtccgtccgggtcgctctgcaagtactccaccagcaccatcacgtacgcgtaggcgtaggagggtgcgcgtggtgtagtcgagattctagacatggtgtgagagatctcttgtggcgtccgtatcctatcctttgacctacaaatattagatgttgttagatttggtttggtctaaccattcggctttcgtgtttcgaacctgagaaccatgctgctttggtggctttgtcatcgttcgactaataattacgcgaaatattaaacactgtaaattcgtgtcgactgtaaaaacgcaagcgcgtaagttgccgccgctgatgtaatgaatgctaggcctgaccaatcgagtgagtcaaagccagcagaccacaacggcgcatgcagtgttcgctgttgaggaagatatgtgttgcgagcgcacaatgtatggaaatcttgcgggtgtgccgggcatcaaaccgaggcgcttcaatgtccgtttgtgtttgagaacgtcgagcctgactgtgcgactctatctgcaatggctgtgcgtgctttttcgcgcaaaccatcgggcctcgaacgcatggagcgacagagccgaagttacctggtgttggtctgcgagcaacggctttgcagtgcaccattccacggtggccgtggtacagtagcgcgccgatgcatttactatctcgattgaggacgcgattattagttcgcaatctcgtttagtcggcacgcaggggaagctactgcgcttgctctccgaactctaactctccaactgcagcgtccgatggcggcaggcagccacacaagcaggcggagagtgagcagcgttgttggggccgtcgaactacgtgaactggggcgaccaggccaccatcgagaacgtcaagatcaagggcaagaaggtcgacgtgtgcgcgtggtcgcagggctccacatcgggcgagcccaaggagctgggcgccggtccgtccgggtcgctctgcaagtactccaccagcaccatcacgtacgcgtaggcgtaggagggtgcgcgtggtgtagtcgagattctagacatggtgtgagagatctcttgtggcgtccgtatcctatcctttgacctacaaatattagatgttgttagatttggtttggtctaaccattcggctttcgtgtttcgaacctgagaaccatgctgctttggtggctttgtcatcgttcgactaataattacgcgaaatattaaacactgtaaattcgtgtcgactgtaaaaacgcaagcgcgtaagttgccgccgctgatgtaatgaatgctaggcctgaccaatcgagtgagtcaaagccagcagaccacaacggcgcatgcagtgttcgctgttgaggaagatatgtgttgcgagcgcacaatgtatggaaatcttgcgggtgtgccgggcatcaaaccgaggcgcttcaatgtccgtttgtgtttgagaacgtcgagcctgactgtgcgactctatctgcaatggctgtgcgtgctttttcgcgcaaaccatcgggcctcgaacgcatggagcgacagagccgaagttacctggtgttggtctgcgagcaacggctttgcagtgcaccattccacggtggccgtggtacagtagcgcgccgatgcatttactatctcgattgaggacgcgattattagttcgcaatctcgtttagtcggcacgcaggggaagctactgcgcttgctctccgaactcttaactctccaactgcagcgtccgatggcggcaggcagccacacaagcaggcggagagtgagcagcgttgttggggccgtcgaactacgttcaaagaaaacaaatcttgcgcgccgcggcccggcacagcgaatttatcccccaccgtgccgacaatacactgtagcggtggttaaagtaccgagccgcgagcgacaggcggaggtgcgtggcgtgccatccagcacatgctgccgggcgagcttccgctgtccgttcttttcgctgtcagaggtcgtttgtattgtcgtcgatttggttagtcgccacccggggtgcacatccccgtggcatggatcggcacgtggtgtctaaagttgcactgcaacttggtacagtgtggctattagcgcaccgaggtcagtcacgcgggtcgggcaccgagtgtcaattatgccaacctggtgagggaagcgaagcaaaggtggtcatccccccaagcttcggccgtagcatctggcattcgagagcaagcacgcccgaccgtggacgccaactcaacaaagttggcgtccgttcctctgtccttgtagcggccggagatttcctgggatcgctcatgcacgccgccaccaccaccgctgttgctgctgctgccgccgctctctctcggtcattatccaattcactcgcttcgtggcaggcaggcaaccaacgaaccaactcgacaaccgaccgatcgaccacctttagctcaagcaccacctactctccaccgctcagccatggtcaacgcattatccacgatcgctgctgctctcgccgcctccgccgtcgttgcctccggtgcgtccatgcgctccgaggcggacgccatgccatctggctcgtggcccgccagcaagggcaacgtctacctgtcggagccctacaccgtcaagaagggcgaggtgttcgacggcggcatgaagacgtaccagcgctcgaacgtcaagtgcggcggccaggcagagagcggctggcagaccgccgtcttcatggtggagccgggcgccacgctcaagaacgtcatcatcggcaaggaccaaatggagggcgtgcactgcgagcagagcggctgcaccatccagaacgtctggtgggacgacgtctgcgaggacgcgctgagcatcaagggcggctcggccagcagcgtctccaaggtggtcggcggcggcgcgcgctcggccgacgacaaggtggtgcagcacaacgggctcggctccgtctccatcgagggcttctacgtgcaggacttcggcaagctctaccgctcctgcggcacgtgcggcgacaagtcgcgcaaggtcagcgtcaagaacgtgtacgccgtcaacggcaaggtgagcctcgtgacggtcaacaagaactggggcgaccaggccaccatcgagaacgtcaagatcaagggcaagaaggtcgacgtgtgcgcgtggtcgcagggctccacatcgggcgagcccaaggagctgggcgccggtccgtccgggtcgctctgcaagtactccaccagcaccatcacgtacgcgtaggcgtaggagggtgcgcgtggtgtagtcgagattctagacatggtgtgagagatctcttgtggcgtccgtatcctatcctttgacctacaaatattagatgttgtttgatttggtttggtctaaccattcggctttcgtgtttcgaacctgagaaccatgctgctttggtggctttgtcatcgttcgactaataattacgcgaaatattaaacactgtaaattcgtgtcgactgtaaaaacgcaagcgcgtaagttgccgccgctgatgtaatgaatgctaggcctgaccaatcgagtgagtcaaagccagcagaccacaacggcgcatgcagtgttcgctgttgaggaagatatgtgttgcgagcgcacaatgtatggaaatcttgcgggtgtgccgggcatcaaaccgaggcgcttcaatgtccgtttgtgtttgagaacgtcgagcctgactgtgcgactctatctgcaatggctgtgcgtgctttttcgcgcaaaccatcgggcctcgaacgcatggagcgacagagccgaagttacctggtgttggtctgcgagcaacggctttgcagtgcaccattccacggtggccgtggtacagtagcgcgccgatgcatttactatctcgattgaggacgcgattattagttcgcaatctcgtttagtcggcacgcaggggaagctactgcgcttgctctccgaactctaactctccaactgcagcgtccgatggcggcaggcagccacacaagcaggcggagagtgagcagcgttgttggggccgtcgaactacgttcaaagaaaacaaatcttgcgcgccgcggcccggcacagcgaatttatcccccaccgtgccgacaatacactgtagcggtggttaaagtaccgagccgcgagcgacaggcggaggtgcgtggcgtgccatccagcacatgctgccgggcgagcttccgctgtccgttcttttcgctgtcagaggtcgtttgtattgtcgtcgatttggttagtcgccacccggggtgcacatccccgtggcatggatcggcacgtggtgtctaaagttgcactgcaacttggtacagtgtggctattagcgcaccgaggtcagtcacgcgggtcggccggtcgtgagcaccgagtgtcaattatgccaacctggtgagggaagcgaagcaaaggtggtcatccccccaagcttcggccgtagcatctggcattcgagagcaagcacgcccgaccgtggacgccaactcaacaaagttggcgtccgttcctctgtccttgtagcggccggagatcccctgggatcgctcatgcacgccgccaccaccaccgctgttgctgctgctgccgccgcgctctctcggtcattatccaattcactcgcttcgtggcaggcaggcaaccaacgaaccaactcgacaaccgaccgatcgaccacctttagctcaagcaccacctactctccaccgctcagccatggtcaacgcattatccacgatcgctgctgctctcgccgcctccgccgtcgttgcctccggtgcgtccatgcgctccgaggcggacgccatgccatctggctcgtggcccgccagcaagggcaacgtctacctgtcggagccctacaccgtcaagaagggcgaggtgttcgacggcggcatgaagacgtaccagcgctcgaacgtcaagtgcggcggccaggcagagagcggctggcagaccgccgtcttcatggtggagccgggcgccacgctcaagaacgtcatcatcggcaaggaccaaatggagggcgtgcactgcgagcagagcggctgcaccatccagaacgtctggtgggacgacgtctgcgaggacgcgctgagcatcaagggcggctcggccagcagcgtctccaaggtggtcggcggcggcgcgcgctcggccgacgacaaggtggtgcagcacaacgggctcggctccgtctccatcgagggcttctacgtgcaggacttcggcaagctctaccgctcctgcggcacgtgcggcgacaagtcgcgcaaggtcagcgtcaagaacgtgtacgccgtcaacggcaaggtgagcctcgtgacggtcaacaagaactggggcgaccaggccaccatcgagaacgtcaagatcaagggcaagaaggtcgacgtgtgcgcgtggtcgcagggctccacgtcgggcgagcccaaggagctgggcgccggtccgtccgtgtcgctctgcaagtactccaccagcaccatcacgtacgcgtaggcgtaggagggtgcgagtggtgtagtccagattctagacatggtgtgagagatctcttgtggcgtccgtatcctacctatcctttgacctacaaatattaagtgttgtttggttcggtttggtttggtttggtttgtttggttgcacattgggcgccttccaaaacccatataaaaccgtttgatcgtatagtggagttcagaccaaaaagtggtctcatcaaacaattctaatgcgactctcaactagcaacgtgattaaacaagtgactgaactccactatattcgaaggtcgcgttccagcaaccgttttggggcgcattaaacgcttcggtaatttaaaataaattacgggttaaactgatcaaacggttttatatgagttttggaaggcgcccattcgctgttttccgtgtgctgtcggactaaccattcggctttcgtgtttcgagcctgagaaccatgctgctttggtggctttgtcatcgttcggagacatgtacacgaaatattggaccgattcccgtccggcaaaattgttgtataaaatctcttgcacatgtacaaatctcgtccagcccgcaggttgaaccggcaatttggtctctagatgttctaattcggtactacttgtgcactttgaaattgaagtgattggacgcttatggcaagatagactcccaaccaagagtggtggcgatgctaacgacgaatgcagtgtcatttcggcagcataaatgcgttgcttcgccgtgtcttgggttcggtagcttagctttcctcgttttctgcgtctggcggtgcggtagatgctgccggatgactcgccttgcgctgccattgcgacggcagcgttgttggactcgttgacaaagtcgtcttcttcatcggcgtgtatcatttgcaaaatgccggccagcaatgtaaattcgtgtcgactgtacaaatgcactctcgtttccgccgaggattaacgttagacctagtacatcgagtaagtcgaggcctgcagagcacgacgatgacgctcactattgcggatattatttttgtgaccgcggtaatgtagtagagatcttgcttgtatttgagcattcgatgaggaacgagaggcttgaattgattagaagaaccccacggtatagaaacatacgtaagtacagtggtgatctacttcttctgcttcgaagtaactgggaatgcatgggtgttacacggcacaaacattgcctattttgcacctgcttcgacgtcttcgtcactttcgtcaaattataaagtaaggcaagttgccactttagtagaattttcgatggcaatttttagccaaccgcccctgcttgtaatattgaccgcaaggtactgagtgaggtatggaattgtagctcaagatttcaacaatcagagacgatatcagctaactaaatccatgcaatattcagcacatttaacgcaagctactaagccatctcgtattcgaggttgtgccagtttagtagagattttatcaggggggttgtattgaaataccagctgtttgctcccttgcaccttgaataatatattgtgaattctggccaatattgccgattcgggtcggtttaccatatgggttgaaatcgctgaatacaaatttcaagtcttttggaatcgaccgagacggcctgagcgacttcttatttcgtactttattgcgtacatagtaaactcaagtcaaatcaaaatctcgggcggtttgctggcgatttggctcggtcgattcaatcaatcgacttcggaaagttcgactagaacgcgcaatattatcaaccaatcatggaagctatacgcgaaatactgtctgttcattggtcgacgtgacactctactaaactgctcactctcaaccaaagtggcaacttgccttattcattatttacatttcaagtcttcccgggtgccatcaaatcgtcgctacaacaccgtcgatagagatgttatgacgtctaccgtggtgctttcatgaaataggaagcgaatgtacagcgctgtcgcgcttgcgcgtccgagtccacaggaacaatagtcataagcatacagagcgttgggtcacgagaaaaccgcagcctccagaggtccgccacacccgtagcacagggcccacgttgccctttactttacgtacaccttcttgcccgccccattgatattgtatttgcctccgcgaggaccgacgtggaaaactcgactgtctgcgttgtccgttttgtccgttgtgacgtcttcctcagagcactcatccacataatcgctgtcgtctgcagaggagtcgtcgccaaaatccccactctcttggttttcgcggcgggctggcgcttttgcggcagtgcgaggctgacgctgtttccgctttgcctgacttgactttccctttcgagaagcggcacctgcgcgtttggtggcgctctttttcacccttggctcttgtttgcttggtgttccacgtccaggttgggccttcaccttgactggtcgagcgggctcttcagcgattgctgttgtagaagcggatcgagcgacggctgcatgctttttcttcttcttgctgtgtgagtggaatactttcgctgccaggcgagaaaatgggtttcggtgcttcttttctggggaaagaggagactgcgagtctgtagtcattgaagccattctgggcttcgggtctgctttcttttccggtgagggcggcgtcctcggtggatgtggcgctggtgacggcgagcggaatctgccgcgaggaatttgccgcaattcctgcttgtccttgtcaatatcccagagcttaggtcgactaccgacgtcgagccgattaaactgctgccgcaagctcacgtacaaatagtggccgttggctgcgatcatggcgtcctggaacccctcgtcttgggcatgcttcgcaatctggaccagccggtcgtattcacgcgctgagatctttcggtcctgcttcttgctggtctcagctagctccgacggtggcggcgcgtccttggcgttgatcagcatcgcgtccacctttttgtgcagcacctggttgctcgtcgccagcatgaggcggaggttgctcgggtggttgaggatctcgcgcagctcctcgcccatgcgctgctctaccggcagccgctcgttcagccgcagcatcacctccagtccgatgtagtgagctgcttccagcttgtccttgttggcggcgtccgagttgtctcggcacgcctgctgcttggcaggcatgcgcaggttgtgcgtgtgcagcggcacgttgggcagcgcgtccagctcgcccctctcgtacattttggccagcgcggcctctccgtactcggtcagcgccgccgagaccatggcgatctccaggatcttgtctttcgtgcacgtgctgccctcctcaagcggcccgacggcgtcctcgacccagcgcagcagctcggccttgctcttgctggtcttgcggcccacctcgcgcgccagcgacatgtggtggttcttgaagtagttgcggtacttgcagaagcggtcgtggtcgctgctccgcagccgttgcgcgcgccgcgtgttctccgggctgtggatgtcgtccaccgtgaactcggcgcgcgcctcggccgagatctcgtcgccctgctggttgccacgcggtcggggcccatccggacggctgttgccgtcgcccgacggctgcgggcgcgagagcttgagacccatttgctgggtgcctccgcttgaagagtgagcgacctgatttcctgctcgacgaacgccacgcgcaaaagtttcctaaattctggctttttatgtactttaccggaatttaggattggtgtacaacacacaaatggagatggaccaccttcaacttacagtacgatctcgaagtatactttcgctagttgtatggcgaacatcgagcaaaacgttattttttatggtatgtagggtgagccatgcaagtcaaaagtgaagcaacagcgctgaccctaattctcagccgcgcggcgcttgttctggcggatggcgcggaactcctcctggatctcgtcgttggtcttgcccgacgtctctgggagcaggaagaacacgaacacgaacgagatggccagcagcaccacgaacggaacgtacgccaggtcatccagcgcacttgagatgtaagggtagcctacgcccacgaccaggtttgcggaccaagcggtaagcacgcaaatggaggtgacggtggcacgcgcgtagtcggggaagatgtcggcaatgaccacgtacatcagggggccaagactcacaccgaacgaggccacgtatgtcgcgatgaacagaatcgacagcgccgaccagctgaacgatagcgagagtgtcacgccgatagcgctgatgaacatgccggccaggccccacagcagcatgcgacggttgccgaagtgagcagcgaagaaacccgagaccaacgtcggcagcatgttgacgatgtcgatgatgacagcactcacacgggcgttgctcagaccggcctggttgaacaggtccgacgagtagtagaacaccgtgttgatacccgtgatcttctgcatcacggcgacgccgaaggcgataataaattggcggcgaagaggaggcgcgatcagctccgagaaggacacacccttgccgctacggacgacgtcattgcccgtctcgctccacgtgctcgactgcatctccatgtcgtgcttacgctttgactcgatccactccagagccacgggcacgctctcagcaccgaacagacgggcgagcacagcctcggcctcagcgcgtcgccccttaagcagcagccacacaggcgactccaccatcaggaacggcgacatgctcaggaagatggccgccagcacgatcgggaacgcagcaatgtaacgccagccgttgtggaagtccatgtagaagaacgttgttgccgccagcaggataccgacagtgatgccactgtggaggacggcgccgagaagcgaacggaggtggggaggcgagatctcgttgatgtagccaccgacgttgcccgtcgtcgcaccagaggcaataccagcaagcagacggccgactgcgaacacccacaggttcgacaccgaagccatgatgacagctcccgctacgatgaagccgcagttgtagaccagaacttgcttacgaccaaaacgatcggcaaacttgccaacaaggccggcaccgatcatgccaccgacaatccatgcgttcacgacgatggtccactggaacttggtgtggcctgggaacatgatgcacgtgccttccactactggccgagcattgcagtcgtcgacattgttgaacttgcgaaggttgagctgcgaggtcgaccaaccgaactgcagcggcagcacgaacgcgagcatggcgctcgtccacaggatgtacgtgggctggacgtgcatgcgcgcctctgcggcttcttggtcgatgtgggcgagctcggcatctggcgtcgtgacctccacgtaggcagggtccttgataactggtgatgcggcgggggacttggtctcacctgccatggtgctggatggatggctacggacggatggagtgcgcttgagaaagccaaattgcgaatgagggagccgctgtgcggtcgagcacagctcggatcccagactgcttggtccgatcgcgtaggaagggcactggcaaagcgtggatgtgcattcaacgcccgagatagggcaccgcgtcctccattatcactaacgagcaagcgtcgcaacagtgatatgcgcgggagcccgagagcgaagctggtggcggtgcagaagcggtcatgggctgactgtttataccgtcggtgcggcacttgcatgcgctgagacgtggcggccaagtgcgcaaaggcgatttgaaagcgaggatcggcagcgagaaatggaattcaggtgccagatacagaagtgaaagttcgccaaacggaaaatgtacagcccatgttttgaaaacattgttttcggattgaagggggtgaaatggcccgcaaatctatcgtgatgcagagaccaaatcggcatcagtggcgtttgagaagcatgaacaacccgcaaacgtagccccgaagcaaggcttaggtctatagttccctgcctagcgctgggccggccttctaaaggttttaaggacaggtagagccacatttagcagctcgattacccagttcccagggatttgcaatagatttgggtgccatgacatccgtcctgaaaaccgaaacatggatgtccatgatttcagcatgttttacatgtttgaagatcttacttggttttagtatgcctttatccctaaccctattccgaaacatgggctgtaggaccagccttcgccaaagctcgccgacgaattcgtgactgtcgagcgtacaggccatttgtggactcgcttgttatttcgtggcggggtgatagcaccagttttactacaatatagcccctccaacttgagggcaccctccaacttggagggtgcccccatacaaactacagccctcttgtcttttttctttgcactgtgctgtattcgcggcccttgaaaacggggtggtacggaaaactatgggggggggtgaagtgttccaaatttgagcaaaaaccgaccggaaccccccctcctgactgcagtttttttaatgccatcacaaacaaactccacagcccccagtactggtgggtggtggggccccaccacccaccagtagaaagaagcattgggtggcagtatctccagcaactcaactaaggctgctcgagaggtaacagacctgtcgagcaaccgcatgtattacagttcgattacctctcgagcagccttagtcgagttgctagggagggccccctcgaggccgggtcgccaccaccccgagtttacaattcgctactggcgaaatagccgggcggtgcaccgaagcagcagcccatctcgtcatgataaggtctcttctatgacagtgttttcgcaagtgtacgttgagaagttctgctgataccgcaagactgtagcgctaagtgtgttttgcggtatcacgaactgtgtgagttgtatggttatctatgtgtctcaatgcgtgttagggttactagccggaggaggggggcaggtgaaagcgatgtccaggatttcacaaaatcgcccctaccgaacctggcgctcccttaactataggcaagcctgggctcatcggagagctagccttgccctttagctttccaacgagaccaacttcacttaatgatattgcgtgcagccttcaggccgttccgtttcctagagcactcgtggaactttggagatttggcgtggttgacctccgtccccgcccagctgccagactgggccaaagtatggccatgataaaaaaaacacgatttgcattggggtgtttttttgcggtatcagcagcaagagccgtgtacgttcgccatcgatcttggcgttcggaacgccgggtgaagcactcttgagttcggccgaagcgatacaatatcgcatccatagtgccgcaacgccaggcctgcagccttgattgagaaataagtttctacagaagttgtcgccatttgaagactgtgctccttcatggcgatagaattggagatattgtagttaagcttatgatcgatggtgaacttcaccggatgaagcctttcccggagtaccacgcactgtatcacgcgaaaacgcacaatttttatcgtgtcctatgtcgtctttcaatcttccgggcacgagcctacatgtaatgcagatgtaccccagcttcatccacgatgaaaatcttgcttccggtattactacgctgcaatgcagcctgcattgctgctggctgctgttacagaggttctgtagcgatcggcctcccaacgtatcgattctgcatgcgccacgtgcggcttgtgcagagggaacaaaatcttgtcgaggctaaaaacgcgagccaagaaggtgctctcgatgggcatgaactaagttcgcgcgacactacaacccacacgttgagagtccaattcgtacttcctatccttcacttgcaaccatcctagcagtgagcagcaaagacaagcagagattaacgcaagattaaacgagaatgacaaattcaagacgtttatgtatatgtatcttgcagccgatccctttgcgactgcgtcctttgcactacagtaagtatctagtttccggcggccgcgcggcgcttcttctggcgaatggcgcggaactcgttctggatctcgtcgttcgtcttgcccgacgtctccgggagcaggaagaacacgaacacgaacgagatggccagcagcaccacgaacgggaggtaggccaagtcctcgagagcgctcgaaatgtacgggtatccaacaccgacgatcaggttggccgtccaggcaaccataacaccgatggaggtgacggtggcacgcgcgtagtcggggaagatgtcggcaatgaccacgtacatcagggggccaagactcacaccgaaagagcccacgtacgtcgcgatgaacagaatcgacagcgccgaccagctgaacgacagcgacagcgtcacgccgatagcgctgatgaacatgccggcaagaccgctcagcagcatgcgacggttgccgaagcgagcagcgaagaaacccgagaccaacgtcggcagcatgttgacaatgtcgatgatgatggtgctgacgcgagcgttgctcagaccggcctggttgaacaggtccgacgagtagtagaacaccgtgttgatacccgtgatcttctgcatgcacgcaacaccaatagcgatgatgaactggcgacggagcggaggcgcgatcagctccgagaagggcacacccttgccgctgcggacgacctcgttgcccgtctcgctccacgtgctcgactgcatctccatgtcgtgcttgcgcttcgactcgatccactcaagagccacaggcacgttctcggcgccgtacagacgagtgagcacagcctcagcctccgggcgacggcccttgagcagcagccacacaggcgactccaccatcaggaacggcgacatgctcaggaagatggccgccagcacgatcgggaacgcagcaatgtaacgccagccgttgtggaagtccatgtagaagaacgtcgtcgcgaccaagaggataccgacagtgatgccactgtggaggacggcgccgagaagcgaacggaggtggggaggcgagatctcgttgatgtagccaccgacgttgcccgtcgtcgcaccagaggcaataccagcaagcagacggccgactgcgaacacccacaggttcgacaccgaagccatgatgacagcaccagcgatgatgaagccgcagttgtacactaggacttgcttgcgaccgaagcgatcagcgaacttgccgacaaggccggcaccgatcatgccaccgacaatccatgcgttcacgacgatggtccactggaacttggtgtggcccgggaacatgatgcacgtgccctcagcgatcggacgggcattgcagtcgtgcacattgttaaacttgcgaaggttgagctgcgacgtcgaccaaccgtactgcaggggcagcacgaaggcgagcatggcgctcgtccacaggatgtacgtgggcttgatgcgcaggcgagctgcagcctcttccggctcgagcaccgtgttgtggatctggggggtcgagacctccgcgtaggcggggtccaccggggaggcgggcacggacttgttctcgtcggtcattgtcgctggaagcaggcgggtcgagtgcggttgcgctcgaggaggccaattggagaatggtcgacatcctgcgcctcgcgacgatcgcgcaaggggggacaggagagcgggctcgtcgatcagagcatcctggttgaacaaccggaagcccaaggagccggcgatctatgtcgatcgcgttaggctccaatcgtgggtgcagaacgagggctgctcggagccgagggcatcaagcacgagtgggtgaagctgagcggggctgtacataccagccagcaacgtgtgtacaaacgttacacagcaacaacaacatcaccgacacgttcccttttctgtaacttccacgagtcaacttttctgcaaatttcgtttcggcgattcgcttgtcgtccaccaaatgcaacatgaagttgaacatctgccgagacttgcttaagttcgggcgacaatttcctagctttggtggacacaactcgcgatggcggggagaccctttcttgagaaacagaacagagcccccagaaatccgatcctgcgaccgcgaacattttctgcccccgctcgccccacttgtcgactaagagcgaacactttagtcgacggccgatgctgaactgcaatggcctatcatacataatgtgcgtgtgttgagtgactgcatcgagctccgcttcgctagcgacgctgcctcccatgcagtcaatgtatgaaggtggcgaagtctcctgtggcgggcgtctagcggcacatttgagcaaggacacaatagagacgggggccaacatgtgcggtccttgcgcttcagaaaccccatcttccagttgcatatcgcatgattcgttcaatgtggcttttctcaacttcagaaacggagccgagcacttcagaaacggagccgaagcagaaccgccaccggttctcccctacatgtacgtgcacggtgcccgtcgacaatactggggaagagctcttttggtaaatgccaaaatgccaaaatgaaggccccagcagtgcgagcgcttcaccacttcatggcatgcaacctccgcccagtatgtcgattgcgttggcacgtgagcgcgtccaccagcaaatcgagccatcatcttcgcagcagtgtcgcgctggctcgtccgcccgcgcgcgcgccttcaatttagagctttcagcagagctttgacgcaattgtaagcattttgctgctttcggcagccgactgagcaggttgaagcgcggcagacatacagcgccgcgatctcctcgcccggccaccaccgccggcacgccttgaagtttcggcgatctaccaagtgcaagcgttgcatgctctcggccgagtgcgccacgccacattgtcatcgctccacgctcgagcgagcagcagcactcaccgtctgtggccgatgatgtatttgatgccctcacaactctcctgcatctttctgtagcggtctcaccggaaccgggtcctaacgaagaaaatgagcatgcaacaggccgccctcaaaggaaggcccacgagggttgaatgagtgagtgagccctcactttgcttcgccacgacgtggataggcatgtgtggatggggccagctggctcggtaataaagtgggcccggtccaaggactgtacgaagcagacaaagcgcagcaactacggtcgggcagaggcctacaaggcttgcaggctgctacacccgcccaacatcaacagcaacaaggtgaacgtaagctccgttttatcaaggagggacatttttgcttcacgcactaaaatgtagcattgacaacgttaactcgaaactacgtccaggataccttccgtttaacgtaacgtggcggcgctgaggtgagctccgatccatgcgcaggctcgtctcaaccacccttgacggtcttgtcgtgctcgacgtcgttgtgcaggattttgtcgaggtcctccttgttcacgtgcgccgcctcctccaggtcgctgtcatgggcgacgtcgaactccttgccgcgcgcctcggggccgaggaacgtgagaaggaccaggtaggcgtacacgacggccatgaagatgcagatgacctttccgtactcatagcggctcgtgccctcggcggtcggcggcagcgggtagttctcaccgagacgcgcctcgatcgtcgacgacgccgacgaaatgaggttacccagctggtaggaagttccgacgataagcgtgctgtacgacggcggcgacagctccatgaggtgaatcgggacgacgccccacgctccctgcacgcagaactgctcgaagaaggccgcgatcatgattttggtgtcgctcgtgtagctgtacgggtacagcagcgcggcgccgatgacggccatgacgatgatgctgagacggcggccgaagacttgcgagtagtagccgaccagggtgccgcccgtgatggcgccgaggttggccacgacctgcgtcacggtgacctcgtcagccgtgaactcgaactgattcttgagcattgtcgggtacaggtcctgcgagccgtgagactgaggggcgcaacagaaaaacggttagcataacgtgttgtgactaaattagtgcacagacaagtaacataccatgaagttgaagccggccatgagcagcacgaggtaagtcagcagcatccagtgacgcttgaacgcgaccttgccctcgtcgaggaaggccttggtgacgttgggcgaggcttcgcgcacggcctggcgctcctggtacaccttggtctcgggcaggtacagacgcgcgatgatgatcagcacgggcgggcaggctccgaaccagaagagcgggcgccagccgtggctcgtcgtgttgaccagcgcgcgggcgaacacgacggcaagcaggtagccgaaggcgtagccctgctgcatcatgccggagatgatgccgcgcgcccgcgggggacagtcctcgagcgccgtggcggccacgttgccgtacaggccgcccatggcgatgccgaagaacgcgcgcacccacaggaactgcgtgtaggtgttgcagaagcccgtcatcagctccagcacgatgaagagaatgttgtttacgacaaacggccacttcctggaaagcaaaactcgtcagtacctgcgcgcaattcactgccgagccgaaagcaatgtgaagattcttaccttccccagcggtccgaagcgataccgaacgtgatcgagccgaccgatcgcagcatgagaacgagcgtgatgccccacgtgatgtccgtcttggtcttgccgaactcctcggccagctcctcgatggtcatcgagacggtgaagaagtcgaaggcgtcccaggaccacgcgatgaaggccaccaggaactgcatccactgcagccggttgagcagcccgagcaccttgaacgggttctcgacctgcgccatggtcggcttgagtgtcgtcacgcgcgacttgaggtactcgccgacgctcatcttctcgtccgacgagtgcggcgcgtcgggcacgcccggagtcagagctggcacgtagccgctgcccggcgactgaggaatgggggccatggctgctgtccgatgcagaggagacgttggcagtgagctgtggtggcgttccgagctcgaaggcgccaattcgagaatgagagatcgctgctggtgctcggctgagtaggtcgaggccggctaagaggtctacagtagttgcagttggcagccacaggtacctgtaatgtatgtcgggcgggtttaacatggctgccagcgcttcaagcacctaggcggggcgtcaggcgtgggaagtccatcctcgttgaagcattgagttggcggggtctggttcaacggtgagctcagctcagccgtaggaacgatgggcaggacctccgatgtgtaggtttgttgagtggtcccgcgccggcacaactgctgcatccacggtgcaccatgcccgcgcgagaaggcggttgtccggtgccggaggttaccagagcaaagcatacagcatgcatttatgcatgcgacttcaaggctctcgcatggtttaccgccggggttgccctgcttgtgcgcacagactaaaacttactaaaacggcgactaaaagttcaacacgctccctcggggaaagcagaggaccgccaagtgtgcgtgccctgacacgttgaagcgagaccacaacggtgcctgcccttcaacggaaagcgagtgacgcagggctcgttgccaagcggaaatggtgcgaggtccgcgatcctctgcgggcaattgactcacgcggtaaggttttactagcaaaaaactgagaacatccgtatgtgaaccctctcacaaccggtggccgtcctcaaaacttcggaacatttctctcccaaggcacgtcgagccgagcgtgatctgcggaaatcccctgtacaaactgcgagcggcgtgacgaaaagcgtagcggcgaccaattttaatctgcagacgttgaaggcctcgcgcatgtactatcctatcctccaccgcttctgttttgtattttaatctagcagaagtggacagagatctggaccgccgtcaggtcaaccgccgatctcccttgaaggggggccgccatcgttgctgagcttcgaaaacttggctgaagtgctggataatgctcggtaatgaagcacagaagaagcgagttgccatcgcgagataccaagaggtatcggagacgggagtgcaacgctccgcatgaaaagctgaggcagatggcggtccgcgggtacagtacacgcggaggtggctccgcgtgtattaactgcttcagtcggagggcgatgcgctctcagacagaaagagccgctgatcggcacgagcagctcgtggttgaagtggcggtgccaaagttcaaccgtgcaagaatgagccccttgcaaatccctggccaagtgacactgcgcagtcgcgcgccgccgccattcagccacggttgctcattcgcaattgcaatggtttgggtgcaatatgtacatgtatcggagcgatcttggtggcagtgtccgcatggcacgggtatcactgcaccagtacacttgcgctaatttgctcagcgcttcaaacgcccccgcagcatcgggaaccaaaccgaaatacatgtatcgccaactttgcttctcaccaggtaatggtgagggtccaaacgtctataagaccgatttcgaagcataattgagctcttcgtgtagtacatgttgtagtacttatcactgccaaggtgtccgtagggctcgatcttcaaccacgactcactcgtgtgacacgagtgagtcgtgaagtattgagccagctgaatgaaacgaggtggaaaacacgactcgtattttcctcctcgtttccgtttcattctgctggctcaatacttcggacttatcaagagctcgtgggcccgttgatcaagtctggggggtagattgcacctgctgaatcagggtcagaggacgcttggccaggaaagcaactccataggtcccaacgaacatctacacgtacgacgccgtactactagtatttgtttttacttttgctcaacaaaaaaaaactgcagcagtctaaggccgcgtgcgaagcacgcgcaggtaaactcaggcttagcaaacgtgcttggatggtcaatgcaaaagcaacacgttgaaattgcaattctgtaagtgactaaaattcagaagacaagttcaaatgctccacccttataacttgttggcttcttctactttttatgatgaacttgttctgccttcgggccgatacaagtacccgggcaaaataacataataatgaaagaggatgtcgcgcagacttggaagacacatcaattgcccgaaaagtgtcgggcgtgtacttactgttcttcgagaatctcaatgcacagtaagcatgcgcccaaattgagatgaagcggtggtgcagtacatgtatcagattgcattgctcctttgcctaaagcgctgacggccgcctactccagagctgaatcctgcttcgtttcgtttgtgtttcgttttgagttgaggtgaggtgcactacagtcttttagcctaactaacgtcctaataaatgcccaatcctccagcgcttacaggtcggagatcttacttcctccccaatgatgacactccagccctcccatgctgcaacctgtcagcgaattcgtgtgatggggcaaaaacaaggctggtagtatccgtgaacggcccaccaagctagtgctcggacttctcgatcgttaatccaacattcattcaacgccaaaaaatatcgtttgcaggaccacaatgtcactataagtataccaggactacttttcgtgagaatttagaagaagaatcgacatgatttctgtgctaccgtagtttagacacctcacgtaaaactacttgactgcttacgtggtatccaatgcggcttggtgcgatgctatggtgtcgatcgacaggtcataacccaaacggctaagcacttcggctagtgccgcaagatcgactctcaactcctccgcgtggcgatagataaacttgcagtgacttcgctaggacgatttgatgttggcaatactggttaggagctttcgacgacgagcgtgctgtaacgacggcggcgacagctccatgaggacaaggacgtttttgtgtgtgacgctatgatagctttgacttcttcaccgtaaggaaaagatgttcagctagtacaactcggatgggtgtcaagtaaatacctaatttagactttcgacgagtaaacaaaactaatgactgtgatggaatgaaaccatgatctccgcaagctacaactgtaaattttaagtatacgtcgtgcaacaaaggttaactactttccaccttgaacagcgtgctgaccttaatgccgaaagcttattgatgtccaggcccatcggtaaactgctgcgagccatgacactgcatatgaaccgtcgtgccgtccgtaaagcgaactgaactgacagcggttcttcgcaatgtgttccaagatactccttcatcacgggacaatgaatcacataatacctgggccccagtgagaactttaattaaagggttaaaacgcgaaaattggtgctgtcgcgctggatctcactgcgtgatttccgtaggtgttaggtttatggtggtctagaatcacacgcaacgtatcgttgagttttgaactttcaccgaaatttaatagattgtatgcttcatctacctcttctacttcttgccgccatcgaggagaggagcaagttcgccaggcattacctgttgttaattgaacttggcaaaatgtccacttaattaagcgtaataagaactatggagtgagaagcatgtcccccctctcctttaataataaggggtgaggtctattaaagctaaagaagatgtaaggtgagccgtatgcagctaacgagtgaaacgctattagtggtgatgataacaccttcttaatgtagagtgtgagcaggagtgcagatgaaaccatatgttccaagtgcaaccaagtaccaactgtcaagtactaactatcagatcctaatctgagtaggcaaatcaccgcatctgattggctcaatcaacggggtgacactaaacaactccggacacttaacacctagatttcggtactttgatcctgataaatataaagttactaatatacaacgatggcgtactctcctgagcaataccaagctagcaaggaacgtatcaaagcagcgcagaagcgctactaccagcgcacacgcgaagcccgtttatcttatcaaaaagactacgatgacaagaatagagaccagattcgagctcgcaagcgtaaacccaaaaccgaacttattgatggtgaagtcgaacttaataatgaaaccgaacttaattaattaattaatttttttcctcggataaaaagtcgcctatgatataaagtcaatcctgatacaagacccaatattataaagtcgttttttcggagaataatatagccaccgatatatagcaatgttcgcatacgagcttgaaggtcttaagagattaaatattaacccaatccgatggggtagcagctaccgtattaaggtacgtggcaagacggggcgcatggtatacattagcaacatttcccaccccatcaaccaaaaattggtagcgaagcagtacaagatcagtctaggcaagctccaaaagaatttggctgctgatttcaaggaagacagtaagtaccgcttctaccaaggcaaacacatggagtcgcacctatatgagggaatccagcctgctgacttctacgacaagcttgagaacgtgcttgcaacccagaagtctgccttcaaggtcaacatcgctcttggatacaagcttgtcagcagaaccgatgacagcgagactcgctacttccacccgaatattagcaacacatctgtatttagcactcctgtggctatcaacagcaaggctgatattcgtaagaaggtgatctcggagattcgctccatggagttggctgacaagctcaactaccccagatccgggtacatggtgaagggtattactggcttcaaaatctatatctaccagcgcgaccatgcgctgggcgatagtgaggctgtcattcctaaggtgatccgcgataacaagcacgtcatcaacttccccaagacgaataacaagtgtgtcttccactgcattgcttatcacaagcaggagggggcgaagaaggatccacgcagaatccaggctctggtgaaacaagccttcaagcagtactgttcgtacaaggagatcacctacactctgggtctgttccgcaatttcaagcctatcgatattctccaattcgatgagcttgaggagtgcttcaagctgaacatcaacgtcttcaccatggatgttgagacgggcaaggttgaatgcattcgccgctcggacaaggactatgattcgataaacatcctgtcgcacgagaatcacgctctctacatcacgaacattgatatgctccagcagaagtaccaatgctccaagtgtgagatggtgtttgtcagctctgataagctacgcaaccacaccaagaaccagtgtgaactcgtgaacatcgaatcgttcccagctcagccaaccatctaccaacccgctccgaatagcattcgttccaaactgactaagtactccatcgaggatgctgaccattacatcgatcacttcattgtatatgattttgaggctatcctcaagcctacgggtgtcaaacacggagagaatactatcttcacagacgaacacatccctgtgtctgtttccgtagccaacagcttgactgaggaggtgcgatgctttgtcagcgatgatccaaaggagttgctcaaggatatgttccagtacatcgaggaagttgcggctaagattcagcgttataacgtctcgaagtatgagactttgctacacaagatcatcaacgtccatggtttgactgacgctgaggttcctggcctagacttgggtaagacgtacaagatggaagatgtcaatgcttggattcagaacggagattttgctagtttcttcgatctccacagcaagctcacattcggtaagaagcgctctgactatggtaagctgaagcagtgcattgatcaggtaccagtactcggattcaactctggacgatacgacatcaaccttatcaaggcggacctgtttgcagtcatcggtactgacaacatcacatcagtcagcaagaaccctagctacatgtgcatcgccacgtcagacatgaagatgcttgacattagcaactatgttccggcaggcaccagctatgcaaagtacttgttgacatatctcggtgagtgcaagtgtgatgacaagattcgatgcgtctgtggcctaggaaaaggtatcttcccgtacgagtacattacgtaatttgacgtactcagtcagtcggaagtccctcctaagtcggcattcgacggcactctccgtagcactagcatcagtgatgaggactttgcgcgggtacagttcgtatggggacactatggcatgaagtcaatcaaggatctactcatttggtacaacaacctcgatgtagtccccttcatcaaggccatcaaagcccagcgagaactattcaaacgtttcgaacttgatatgttcgctgatggtgtgtcgctacctggtctctctgagaaagtcatgtatcagacgtgcttcaacaacctccagcaaccaagtaaggagcctgcggaagcgtttgactttcccactagtcgcttaagtggatataagacccaggatgctgatgccgatcgcgaattcaatatgacgctagaacacgtcaacgacttgctagagcgacaaaagtacctgtgcgggttatgctacaagcaactcacagctgatactgcctcggccgaccgaatcaataacaagctcggacacatcgatggcaatatcttgatcagctgtgtgggatgcaatgttgctcgcaagaacatgtcgctaaagggcttccgccataagaagctacttgaattcaactcagacaggttggtgtacagtatcgatagagaggagaaggacatctacaccaagatgaaggcgaacattgctggtggtccttctatcatcttcaacagatacgcaaaacgcaacgaaactaagattcgagggggtaagatctgcaaaaagatcatcggctacgatgctaatgctctgtatttgtgggctcttggtaacgagatgccatgtggacggttgaccaccatcgaggcatacacagggatcgtcgatgatattgtaaatggcaagatctttggcttcctagagtgtgatatccgtacaccagagcatctcaaaccctatttcagtgaaatgaccccaattttcaagaacacccttatcgactgcagcgatcggagtgtcatcggtctgcacatgttcgagtacaacgaggggtgcaagcaaagccgagcaaagccggctcgcaaactcatcgggagctactttggtgagaagatcctcatttatgcaccgctactcaaatggtacatttctcatggcatggagatcaccaagacttacagcttcatcagggctagctctcacaaggcgtttgctccattcatggaagccgtatcgaacgcgcgacgggaaggtgatgccgataagtctaaggccatgattgctgagatgatgaaactagtaggtaattcagcgttcggtcgcagtggcatggacatgagcaagcataaggaggtcaagtatgagtcggatgagaaggcaattaaatcaaagattgagcacttcaccttccatggaatggaagagttgaatgattcatgtgaattcacaatgaagaagagaaagctcaacaacaagaacccaattcatctctcgattgcaatctatcagctcgctaagctccgcatgcttgagttctactacgattttattgacttctacttcgaccgctcaaattttcagtatcaggagatggacaccgactctggctacatcgctttcagctgtgaaaagccatttgaggagtgcatcaagcctgagcttcgtgagcattttcagcagcacaagtatgagtggttcccgcgcgactataatgagactgtagccaagtttgatcgtcgaacccctggtttatttaaggaagagtggtctggtgatgctatggtatcattgtcctctaagaactacatttgctacctaccagatgaatcttacaaggtcaaggtttcagcgaagggagtccagcagagtgctggacgcaatggcgacgtcctcaacccagatggctttgaatcagttgttcgcgatcgcatcacgctacagggtaccaacaaggggtttagactcagtaaggagagtaagtcaataattacgtacagccagactaaaacagctctaaattactactcgtgtacttgcggatggtatcaccaccgagccgctcgacatataagcaactacccggcaggggatttttttttgttttataaccatatagagcgatggatcagctgttgtccaaattatactataaccccaaaacgggctatgtgggggcacaagccttgtaccagaaggcgaaagaactaaagccgaatataacaatgaaaatcgtcaaggaatggttctcaaaccagagcgatattcagcgatttcaggagcagaagaagcgatacgatgggttcaaaatagcttcgcataaccctaactcttggcaaattgacctcgcgttttgggagaagcgaccaattttgactgctatcaatatcaactcgaggttgggctttgccaaggtcttatcgaacaagacagcagcaactgtgttagcagcgcttaaagcgtttgttcgactccataaagtggatatcattacaagcgataacggtagcgagttcatgaactcgcaggctcaagcatacttcaaatccaaaaaaattgaacactacaacaacgatccaggtgatcacggtactatgggaaaaatcgagcgatttaacagaacgttgaagcagagactaactaaaatgtcccccaatagaattacgcaaaagcttattggtgatgtgatcgaaaactacaatagcacgtttcatcgttcgattggtatgaccccgagtgatgccaaaggtaaagtaatggatgcggatctgagtcataatcaagcagaagccgatagaattgagaaggagtttgaggtcggatcaagcgtattataccgtctcaagaagcatgcatttggtaaggaatcggctcggtggagcaatgcagtctacatgatagttggaattgatggctaccgagtccaaatccgctcaaagaatggtcataccctctacaaggctccaaacgatcttaaactggtcaaaacagagactacagatgctactattaatcgaggtgatattcttgaggcggaaaagatcttggatcataagaagacacggactgggaagtacaaatatctgataaaatggctcggtaatgaacttgactcctgggagccacaagataatcttagatttgtcaataagaacaagagatcaaccttagagaatgagtactggaagtcgataaaaaaatgagtcgaactagcttcaaaataagtttaatagagcaatcctctgtaagctttgactcatctatatctatcaatttagtttttgaaaacgattgcataaatatatgacttcatatagataaaagaatgtgttccaactgcgtagagaaccaacgtgagcttgtacagctccgacgaaagctgtggatcattcaggaggtaagtcgaatcaaaaatgagttgctgaatcttgatgcaagcgcgaattttcgtaagacagtggtcaatcataaatacagacacgaattggaggaaatctttggcgttccattccattgtattaaagaccaatatttaaatctattaaacgaacgaaatcgtatttgtcattcgtatctacctttccgccatgactcagttatgccgagctattggtaattcgaatactcatttttttatgcctaacatctatataggatcgatatgtttccaaattttacatcacttgctcaaagagagcagaagcgactagagttgctcgaaagagctcaacgacgggttcgacaagccaattccaagcgtcagatgtacgaaggcgcatcatgggctagtgacatcatcaagggcatcaccaccgttactaagaaaacagctgaatccacacagactgatatttctgtcggacctgacgaagaaacgcctgatgaattaaaaattccgctcgcggaaatcttaaaaaaaagctgaaaattgaaaactcccagaaaaaccctgagtcctcaacatcaactaaaactgaagccatgccaaatgttcatccgttaatggtagatgctggtgttagcgcagtacctacaacaagcgatgcagaagctactgttaagcctcaaacaagtgatgcttcgaccacagcaaagcctcaaaccagtgatggttgggtccacgtgagacctgatatgaatgatgttggaattgataatagtgcaagaatgacagatactggtgtaaacactgacatattcaatgagaaaaaggcagacacctctattcgagatattgaggagcaagttcatgcgcgtgaatggattaaaaagttctttacggacaatcctaactgggtggcgcttggtattcacccagtgaaaaagaaaactggtagagatgatcaaaacctagtaattagtgaaaagggttctcttcgctcagtgcgtagcggtcgtaaatacaagagatatcacttgatcgattggattgccactgaaggaaagattcgcgatattttctacgatggggaaagcaactcgatcgatgaagttgatgcgatgcgtagggaagacaaaccacctcgatcagatagaaagcggagaggtgatgatgatattgaggacttagatactccacttaaggagccaagactagatttaaagtacaaggacaaatctacttctacaaagctagatgatgacgacgccaagtacaatcttacatggttgattattcaaaatagtgctttgctagaagccaatcatcttcataagcaaatcaatcctatcctcaaggacgggaaaatttataaagaggggtatctatggcttgacgccaatttccgaatctatgtatttggaaccgacactaataagcatcgccctgctgtacagaaagaagtcaattggatagccacactcgagcgattcgtagcaatggttaaggataagggattggtgctatcgctaaacactcaaatggataaggagaaacttgccaaagcatacgatgcgtttgatggggactttgaagaacttccaggacttaaaaccggaaaagatgaagatatggataaattaatgtctatcccagatctcgaagctaaaaccatcctcacccagtactataagaaacttgctaataatggagtatcgattgccacaaggttgtatccgattgttgattccgataagggtattaaaacccatcctacttactatcttggcatgccgatagatactaaaccactgaacttcaagaatgcacagcacaaaccagtgaagggtgatgctatggcttacctaatgaaaactatcagatggatggatacatttcaatccttactaaccaagcttgaagattatggtaagtacgttgatgagaatgatgataagaatttagagaaaattcttgatgataacctcaaactactccgtgaagctatcttcagcaacgttttgtgacattaaaagcccactaggttacgatggctatgaggacgcgcagctacaaaagctacacgatgaggctgaagaagcctatcgcgcatacggagaagcctacagtcagctggaaaagaatctacatgatttaaagagctcaaattcagaagccgataaggacgctgtaagagcttcaaaagcagctgtaaaagctactaaggcagcgtatacggttaagaaacgtgattatataaccagagcacaagaactcaatgaaattaggtacaatgatcatccaatgcccgattcggctcgagcaagggtggaccgagctaatgtccgtgctcactttcgtcatttagctcaaggtagcgggcttaaggggcgaggattgcgtggtgcaggagttgctccattggaaggtgtggttcgccgaggtcgtacctataatctcaacgagatccagggattagctacacctagtgcctatacctataagcagcttgggagcaaatacatcagaattcccgatcttgatgcaaaaacactggtcattgtacagccgaatcgccgaaaatgtggtccaaaatgtcaaatcagtgagagtctccaaagaatgatccgaaccttagtctataagcagcaaattgatcaagcctcatacgataagctatcgatcgatgataagaagcttttcaaggaaatcctagcaatcactcacctccagtacaacttccacgacaagcttgaggatccactttcgacgctccgcgccgagtatgacaagctgaaaggtgaattagagctaggaaacgataatcctagcatcatcaaacagctgaagtctctcacggtggatatgtacagcaatcgtctgattgatgataaggagttcaaggaaattatcactcgattactataaactatgaaatttcctactactctaattatcgcttgggccatttttattttcggactaatatagctatgttctttttcaacccccgcatcatcgccagttcaggcggcagctatggagacaacagcgatctcaacattgctgagctcaagtccatcatgaagaatctaatcatccatgaccgacctcaacagacccaagcagcagcatgggctactgacctcgataagtcaatcaagaaggtggaagcagctacccaaacggaaggtggacgggtatgggcgtaccagccgaaaaaaaagtcgaagagcgtgaaaacctttgctctatagagatacttctgtttgtttctcacggtagactctaatttttttatcaccgatatcgatagccatgatagcattcttgccgttgtggacattgcgcatggggatataagcattatcaccagtagatactactccatcgcgcatcgttattgagccgatgacttgaccagtttcaggatttgtcaaatcctttgtgatctgccttttacttggtacgcaacccatgatatatatactctaccaaagatattttttcgagaaccaatcggctgtgtatagatttgattcgtcaaggggtccatgcctcttgtagtagctctctcggcgagccttatcgttatgatcgtagtctttgtaagctttcaacgatgtgcgatctcgatactgttgataaggctcaccagtccgcttaatagcaccaaaagatacaaccctcccatcagtaaaaacagcatcatattttttgccttttcgagttgatagtcggaacttgaatggagccattctatataattgagtccaatttttgcttgagttcattgatttgttgctgctgctgttgaatcgctttgcacagaaccgatgtcaggctagatagatctataccccatggattgattggaaatccatcagcattgagatcatcgtttgctccgatatcaacagattccggtataacctcatacatttcctgcgcgatgaatccaacatgtgaggtttgctcctgaatcattttaaatcgttttggtcgcattctcatgaccgcatctattccatattctaaatcgattatatccttcttcaatctctgatctgatgcgttggtatatgaaccacctctcaccggaacataggctgtccaattatagtttccatcgcatttgcctagacggatcgccccgaccgtaaagtcagttccgatcgctgggtagtcagtctggctccaattgaatcgataacgagcgaaaccatctccattacccttgatatgcatgaagttgtttgcccatacctctcctccactgtggatggtcgcttcggggcttgtgtttccaactcccaaccgtccagagtcgttgagatatgctttggtagtattaccaaccatgaacctaagaggatcgcttgtagtggtccctaaagctactccattgcttcctccagcaacatcattgaaaatttgaacttcgaattcgataggcgttgcctgatcattagcgattctcattgcacgctgccacgatccgcttagtaaattcgcggttgatgtaatatcaattttcgcggtcgatgacgatgatccgaatctaatatacccctgttgagtgatacgcatgcgttcagtcatagcactaagagcatttgaaccacttctggtactaattgcaaaatcggccatcgaatattgagcggcagtagctgttctggtacaatatagattgacagatggtgtatacgtagtcatatcactagtaccttcaatcacgaacgataatccagcctgagccccaaccgtgttggattgatttcggataatgaggttgaaatcagacgcacccgttgtcgatgtaaatgaagtaccagcagcaatttggcattgagtggtcgtcgttgagatcagattggtcgaagttagtgatgtgatacctgttgtcaacgcgctattagagtctagaacgagtgccttcaatgcttcagccgttcctgccccagtagtcaaatccaaataattcaactcgcttgtagttgctgtacatccggaaagcttgttcagctccgctccagtagcattcagggttgttcctttgatttgaagagtggtaggattgatgttgagggtagttgcattcatcgtttgagtgccgcttttcgaaatcgtatcacatgtcagcgttggtgatgatattgaagttgaagctataaaattgcgcgatattgttagatctcgaattccagagtaatcctttgtactactgagtacgacagcggtactgggggaagctcctccctcgataacgttaagaaagtaagcatgattgaagttaacccatgcactaacgccatcccagaacttgagattcggaatgaatagacctgtcccacccgtattcagggtgaaattgctcagcgtacctactgaggtaatattcgtctgagccgcggtttgtagcgtgcctgtaagactcgaagctgataatgaactgattcctgaaacattcttcgatccatcaagtaccaatgctttgtttagatccgcggtaccaggcgtaattcctaaaacgtgagatggagcgcttgtaatagttgatccattaacagtcagactactacagctgattgccccgaggccgctgatatcaccaccagatccagggacaagtgctactccttgggttgcaattccttgagagataccggtaatgtatgacaaacgatagtcatacttgtttagataaagagtctgagcatagtcatacgttagaaaaccactggcatccaacgataggtagaatgcagggttatagattgaagatgtgaatgttggttgaggataagaaaaaccagaactcattttgtctaaagctatatagattagacgataatcatgagcggtattcctgattttggggcttcaatcccaaaaaagttcaaaagcgcatcgatgggtgatattccagcgcttgacatcaaagcgttgtttagaatggtggttctggggccatcgttcagtgggaagaacaatctatgtatgtacatcctcaaacattctcctcacgtattcgctcatctaacgatcattgcccgtaatcctcatcaggagttgtacgaatatcttcgcgacaagctggatggctttatcacattcgccgaccctgattcgcctccaagtgttgatcaggttcgtcatacaccaatcaactccaataaacctgagctcgtcatcatagatgactacagcaacgataagctacttcagaagaatttgttctctcattactatacaagaggtcgccacttcaagctcagtacgatattcctaagccacagctactttgccacggataagatgatacgcttgaattcagagtatgtagctatcctaaaggcgaattcgaagcgtgatctccagatggttgtgaaagatttcaatatcaagggagtagatgatcgttcaatcgtctattactacaacaaggctacggagcgaaaggggcaaatgctcttcatagattccgtcaagggtcagatcaggtataactttgatagagtgattcgaattgaggactaattttatacaaaaaatgcttccattcatataaaacaatatgtccagctttatcaaactcgatagcaccaatctggtacaggatggaaccaactcaacctggaaatactcttttcccggatcggccgctgacttccgcgatgtagtatgtgctattcaatcgatttcaatgtataactccgagtataacattgattcgatgcaatttcagaacacaaccttcaaaatcgaagtacctaccgctgcaactacatcgacaatcaatctaagccttcctgatggaatctactcctacgacgatatcaatcgaagcattcagacggctcttgtcaatgctggggcctatctcatcgatccgtctgggaataatacattctacctcaaaatgagtgctaacagcgtctattacgcttgtcagcttgatttctctcctacacctacaacgctacctacagctgggggtacatggacaagacctaccacaggtctatattcctcgggcggtagtggattgccgactaccactcgtgtccctcgattgatcatcgataatgctgaattcggaaaagtagtaggattgacgcttgggtcatatcctgcttctccagctactgttgcaagtgctcagctctctaatatcattcctcagatccatccaaccagttcctacatcgtccgttgcgatcttatcaaaaacgaatacgtagcctcaggcgatattgtcagcgcttttgatagaggcgatgccgctattggaaaggtcatttcatacaaaccgagtcagtatgcgtggatgaactgtcataacggatctcgtgccagtattacgctaagcatatacaatcaaaatgacaagaaggtcattttccgtgatacttcggtatctattatgctcttgatccgtccaaaaaaataaatcttcgataatgtttttacaatgtaaaagaacctccagacttacccttctttcgcatagctcgtagctttgccattcgctccttcatctccgccgaacccttcgctgggcgtttctttgctactcctactccataacgacgacgaacctcctttcgcatagatctgattagatcctcatgttcaggcttggtagcttttgatagtaggaacttctctcctgcatcgaccgcatcagtgatgattcctctacgtttggcatatccaagagcattcttagcagccttctttacgtcagccatcgatacacgtcctccctccttgtcgctatcggagtcgtaaataccgattcctgttagagacttaattgcagctcgcgcggggatggcagccgttggctgaccggcatacgttgctaacgcaggaacggcagcatcaacggctttgctcaagattcccgaatctttagcaaatttgaaagcagacttgatccctccccacaccttggaccaaatagaacctccttgagccctcttgtatcccttctttacttcgtgcttggtaatgtcaagtctgacaccgcgtccagccttacgagccttaatagctttctcataagacgtcggatgaaggtggataacagaggcgctacccttgagttcgtttgatgtaagactaagcttaccggtcttgaaagctttgctaagctttcgggcaggaatatcacttcaaatagttagttcgcggtacatgtttgctatatacgttgaattaaagaatagttacatttaaatctttcatatttttgaatacatctggcttacgatattgtttcgaatagagccacagcatgcaccatatcccacaataatcaccatacgtaccttggtattgctttggattgtatttaccgactccatactttgttggggctgcctcacccatactatcgaaatactccccatcatgaacacatgtccaatgtcctacatccatattaggttgcctcaacaaaatcagatatgatcctttctttgggagccgctttgttatctcacttgactcaaaaatatcatcaagatgtatattcatttttttcgcaagttcaatgaggtcatgatcagatgtgattggtttaatgaactccataataattaattttgagaaagtatattacatcccatatagaatctcaacgatgagtgaaactcaattatccgaccaatatttgtaccagagctcgctcaagagcgacccggagatcaaggtatcatcaggcaagcgtgtaccgtttgttatcgatctcaaccagggatcgtatcaaaatggtgtcatcactattgacgcaacagctcaactgaatggatcagaagggtttgcgagcctccgtgatgcctacattatgcttccatacaaagtatcgatgaagaatggtgctactggtcagactctacctgctaaccgcttctgcgctactctaaagtgtggcaactggaatgtcatcgatagcctgagtcttgaactaaatggtaagaccatcgtatcgatggccgactacaagttcttttggaacaacgttcgcgctcagactggatacagtcctcagtatgtagagaagcatggagcggaatcgttcttgttccccgatgctgctcagtccgtctcgtacagctctggaactaattccctcaacggcgatggctattcaaacactgctgccttttcttcaactttcaccacttctactcctgctggaggagcaacaattgctaatgacggtctcgtaaagcgtctgttgtcgaaccctcctactgctggcgttgatttctcttcgacgtggccttcggtgggtggagctgctgcttctaccaccattgctaaccaaactgctcgtggtgcatttgtagctggtgctgccactgctaacgcaatcatgggtacatggaactacatgctaaagatcaagctatccgatctccatcctatcttcaaggaacttgatttaatggctaatccccagattcgtctccgtttccgcgtcaatcagggaacttctactatcgctgtagattctacaaagggtatgtctctaacttctactacccttgcttcgggcaatgtatgtcctgtaatggtcgctgcctcttccagtggtaatcccatggctggagtgcttgctgcttctgccggattcagtatctcttggggcgctgtagtcaatgctcttgaacctactatcgatggaacgtatatgcctttcactacggctcgcctgtatgtaccgtttgtacatctttgagaatcctcaggctatcatttctaagccggttaagaaggttcgctacaacgattgctacgctcagtggttctatcagcgggctggtattggaaagcaatcgactcagcataacgcttcctttgatctacagctatcggcaagtgttaagaatgcgaaatacgtagttgtactcccttttgctgaacagactggtaatttcgcttctgctactgttcaggaattccaatctccgttcgatagttctccatggacactccacccaggtagttcgattcgcaacttcaacgtgcgcattggttctactcaggtgttcgacattagccatgattatgacttccatcacttccacaatgagttggctaagatctcttcgatcaatggtgatctaacacctgaattagttaatggtctccttgactatcagacgtggtcgctaactaaccgtgtccttatcgctgacgttagtcgtctgactgagcgtgatgtacctcaagccattcagattcagggtaccaacgctggatgtcaaggcgtaaatctgttggtcctcgtgatcagcgaacaggaactaacgttcgatagactaaccggcgaaattttagaatgctcaaccgcataggttgtagaccccattttagctaacaaaaaaaaattaagctccttgagtagcttaggacacttctcaatcacgaatttgctcttgcgtaggtaatcgatatatccgggatccattcggctaatctgcttgagagtcttaccccgatacttcccccatgtcatcatatatgaattatcgttgctgagaaacttggagtgaaggaaaatcttgatatcctcactaatgttaaggcttggttggttgtgcatccatcgacagtatccaggatcattcttgaatacatcctcaatggattgacctttgtattttccgaaagttagtgtgttcgacatgatgtatgtatggtatctatatagatagcctcttatttttttgaaaaaaataaattatttctgaaaatgacgtcgtaatgtgccagtaattattaggagtttcgtcttaccctcgcatgtgcgatcctgcacgtctacagggtcgcgcggctgcccgctcactaacagacgcctcctcaagctctcaggtggttgagaggtcgcgtcgttgaaatcgctgctgtcccgaaagaaggtttcaggaatgttctcggtggttaattacggtaagaaattatgaaaataaaaactgccggtgtaatgtactactcacgacgagcgcgcacacatgctccgcaccgaggcgttgtcggaggacgcgagggagtagacaatcaatacattatgggatcttaccaaagtcatgaaatggactgttttgtagtagcagcaaggcagcgtcagtcagtcttggtatttgtatttgtatttgtatttgtatttgtatttgtatttgttgcggtttgcttggctaccttcctcccggaggcgcacactgctgcagctccacctacgtcggtagtggacaccactgacctcacccgcggccacgtgtaggcaagctgttggtggtgtcgcaaacaaataactacaaaacgacgtgagggcctctaagagtcaaatgagcggcgaaacttctcgggaatacatgaaaaatgccaaagctaaagtaattgatcagcccggctgaaggcgcttaccagtttgctcggcctgctactgtagtactaggaaatctaaacgatctaagctcgccgtggtgttttaaatatgtagagggagtttgttggtgtcgcagcgctcctccgcacagttctatcgaaccgccaatcattactaccactactatgctgcgcccgatattagtcaggatacgaagtgcaacgaaatgcatcaaaaagagtagcgaagaggaacgcgggccttcctagcagagcctgcgagcactctgcgcctggcagtgccaacagaattggcaagtcgtactattcgccaatcaaatcactagatttgatttgtcgtcaaactgtcttacgaatgctcgacacaagtgattgattactttgatgaatttttccaggcggggaaaccacccgaagatttgagcatgtgttgttaatatgacctaggctgaactgaactgccgatgaactgttttgcgctcttcctaataagaactatggagcgagaagcatgttccccctctcctttaataataagggtgaggtctattgtgttactgattccgtcttggaaatgttccgcctctccttattggctgccctgatactttatctcggcctgcgtgcgcttctagttaagtttacccaattgacgctctctttgcatgcacctgactattattccagagtcatctccgtctgcttcttgagctgaggctaggcatcgaaagtatacacgtcagagatctcaaacttgcaagaacctgatttttcaactaaaaaaacagatcacaaaagctccagtagaagtacaaatatatcatactacttcatccctaggagaattcctgttcccactctaaattagtgctacataaaccattcaaggtggcgacgttttgctcagagcgatattggttgcaccactcgaatttacatgaaaacattgtgctccctccctacatgtaagtggttttaccagcaaatttgattgcggttttcttagacggctaacaaaggcgagttccacactgttgtcgagtaagtagcaccctagttcaaataagttgagaagtcagataaaaaggcaatcgaactattgtccatttcacttattctgccgtgataattctggcataactctaatcccttatcaaccttaattatgccctgaggtagctaattcccatgttaattccgggttgtccctccgtggtcgaattaggagcggcgatgttgaggccgagttaaggcggaataagctaatccagcctgcgttaggcgaaaacagagcgattggcggcttcctacccgccaatccatgccgtatctccgtcgattggctctcaaatgctgatcgcgggtgttaggggaagcgctcacaataagcgttaatcgcccttttatgactctaattccgcctgaattaacagctcgcccgccaaaatatgtgaaaggcacaattacgccgtgctttacacggggcagctctgggttttcttaaacctccctggtattctgcctattgtttcttaaaagttgttaataaatgcctgagctttttaatactaagattttctaccataaatcacgtagaaaatgagaactctgcaatccatgcataattttctaacatttttcgttgcgactttggcgcgcacacctgtggcgcaccagtcgctcgcttcgttaacgttcaaacattgtattcatcggcgaaactccgtattaaacttaagactaatgatgtcaaatgagcttgaaaatactacctccaagttggcgattgctagtctcgtctcgtaaagtggctatatcttgggggggtcagagagcctctacttataaaattgtaaagtggctgtctctgcagctaactcatatctggttgcgttcctttcaagtcgcaacgtggtgcctgtacctagccccaacactttttgtcctaggatctaggaccaaaactcacttaagtacgccgtatttagcaggggtttgtcctagaaccagcaaaaaggaccaaaagtgacttgggggttgtatggaaggaaataagatccaggtaagtacgagggttcatgtataacaaaggcaaaaactgttcgagtggtgtaatggctgaagccctttactgaactcaagtcattttaaggaatttgtcccagaatcctgggcaaaaatgaaatgtaatatgttattaatgacacctttcaactgtagcttttgccgttatggacaatggtggacactacgcataacacaggattaaaagagggaatcaaacgctttttctccgtaccaataagatggcttatctttgaaaaacaacgccagcataagcttctaacttttggtccttgtttttgtccttgatttggcgggtgttggggttagtatacatgtagacaagcacgagctatgacaaatacttaagtacttagtatgctccagcaaaggagttgcgcttcggacgacattcacgtgaataaattacttcggtccgtcgtaatttaccgacgatgttgcacttagccgccacaagcaacatccacctcatttgcatcgtttttactgcggctatacggttttgaagctgctataatagatcagagtatcaccctgcattctcgatacaaacgaatataacaagtaagcaatataaggagaaaaactcgctatattgggttcaagtatccagttggattcttatataacatgaatatcaggttctcaagtattattttagctaagttttgagtttcatgcgttagtttgggttctaagtacatgtataagaatttgaagtaagtttgggtcggagtgactcccttcgttaactctggatctaaactccagagaacacatgttcttcataaaggcgcgtttcttacaagcaactgacgttttattactttagaactctttttttaatcattttacttggttgtgcttggactgcgaaacttactgtgagtagctggagttatcagaactgatgcgcccaaagaacacaatactgtaccatgtcgctcaaggctgattgaaaaaaaaaaaacatacacaaataaagcagcccctaacggggctatcacgctctccacagcaccccacgataaacgctctgacccggattcatgggaatgcttacatctctacctgaacactccgtcagttccttgatacccttaaaccagcccgatttggaaaaattatggacggaattcacactttaacaccaagtaaaaatatacatcgaatcatgtttccgttttgacagaacaatagtacacagtttactacaacattatatatgaagggctacatgtatggtggcttcgtatcgtcagagcctagaactctcaatgaacacaatgtacttaagtacctcaccatgaaaatgagaatgaaatgaatgtggcttcatccgttttggcaaatcgggtggtccgagtcaaatcgggcgaatttgctggagggctccgatttagcaagaagggggaaaatagatatatctgcccgatttgcaaggagcctgaattgccgatttttaccggcaaaagggatcactaccaaacatttctgggaccttctcagattggcatgacatgatgttatagctgccgaacgtgaatgagcagaccattgtgccactacatggatacatgtgcttttgcctccaatgtctgctcggtgtaatgcatccttagcgatagagatgtatgttgacattgtgatgtccctgtttttacgctcctatttcagggcagaaaaaactaaatcggaactccattatggagctccattttatgtaaatcatacatcgcgttgatcgtgttctagtgctgcaagatgtgctcctggtgtctttggcgtcgttcgcttcacccgtactgccacacttcggtcacgcatgaaacattgaactaattcacgcatttaaaaggaaacgttgactacagcttttagctacatgcaagaggcccgtccgtttaacttaacggggatgggtgagcttcagttcatgcacacagaccttgcggcctccttgactattatgttgtgcacggcggtattgaacatatctggtcgaggtccctccattccacttgtgcgctgcctcttccaattcgttgtcgtgggtgatgtcgaacttctcaccgcgcgcctcaaggcagacgcacgtgagcagcaccaggttcgcgtaacggaacgtcatgaagacacagatggcgataccctaaattatagcggctcatgccctcggcggtcggcggctgtgctcatcaccaagacggaccttcaacgccgacgaggccgaggtgatgacgttacctagctggtgggaagttccgacgataagcgtgctgtacgacggcggcgacagctccatgaggtggatccagacgactctcctcgctccctgcacgcgaaacggctcgaagaagtccgcggtcatgcttttggtgttgtcatgtagctagcagcgcggcaccgatgacggccatgacgatgatgctgagacggcggcctatgatttgcgagtggtagccgaccaaggtgccgcccgtaatggcgccgaggttggccacgacctgtgtcacggcgacctcgtcagccaaaaacgcgaactggttcttacacattgttaggtacaggtcctgcgagccatgagactacagggacaaaccaaagcaacaggatagtagctagcataacgtgtcatggcaggaccgatggcgtcaccacagcttaccatgaagttgaagccggccacgagcagcacgaggtaagccagcagtatccagtggcgcttgaacgcgaccttgccgtcggcaaggaatacctcgatgccgtttgaacggagcctcgagcaaggcctggagctcctggtacaccttggtctcagaaaggtacagacgcgcgatgttcatcagtacgagtgggaaggatcctaaccagcgggcaccaaccggggcttgtcgtgttgaccagcacgcgcgcgaacacgatggccagcaagtagacggcgatatagccctactgcatcatgccggggatgattccgcacgcgctgggagaagccgtgaatcgccatggcggtcactttgccgtacaagccgccggtggagatgctgaagagggcgctaactcagagtaattgagtctgagttgcgctacatttgacttgggcaatggtcgtaataaaccatttttgttcttgtgcacgaaagtgcggcgggactttagtgcactttcgaggacttccgtgcactgcactaaacagccctataccgtaataaacgggtccggtgcgacaatatttttaggtcaaaactaagtcaactaaaaaacaaccatgatgtttttcatccagagtgctgcgatgagctccgtccggcaggatgcctctccgcctctcattcttaaagctgcgatccatatgctagttgcgagtgggagggggtgtcaccctcacatatgccgttgtcgcattgaaaccgtttgtcgcaatgaaaccgtttattacggtacatcacgtccataataaaattcacaaaaccaagtaaaataccgaaaaagcttaaagttaaaaatgaaggaatgcggtttgggacacagctagccgattaaacgcaatcaaatcaaattaatcaaattcttgaaaaactctgctgccacgtagacgacaggaagaacaagtgtttagatgtattaaacttatttttcgagttgctaccgctctgagcaaatattaaatgatttctcagcgtgagcgttttgatgttagtgaaatttactagacactaagtcactgtcacacagtggcatgtcagctgactgtatgtagacgagttacagtagtagcagggtaatagtcgttcgatctgttgcggttgaagtggatacaaactaacgacaagctgcttttctcatcttagaatgcaggaagattggtcgaggagagcagtaaaaattacttaattatttaagacttcaaatatcaaaggcagtatccgctcttcctacttgaaaattgtgcaagcaaaaatataatgtttttattatccgtttttacaaatctgattcaatttacatctggcctgatttgccagggctccgattcaggatatctacctcgatttgcggtaactaaagcggacttccatgctggagctccattttaggggctccgaagttaaatgaaaagcaccctttctttttgagatatgattggttaaaaacaaacattctccaccaatccccgcaattatcggacacagttataaccaatcccaggtcgcaaatgtcgttcacctggcccagtataccgtcgctcttccccctcttttcgcgccttcatcgcgcgcccatagcaattccaagtgaaggggaggaggctgtgcgtcaccatgttccccggccgtggcgacaacatcaagcgcgagaaggcggccgcagtggtgcgtcctcagctgcctccaactaacacctaggtagcagccctctgacctgaccaaactctcgtgtctcgcccaggtgggaggcccgcacgcgcacagcaacggctgcgccgtgtgcggctcggaccagaacggggacagcatcctgctctgcgacggctgcgacggcgagtaccacacgtactgcctcgtgccgccgctcacggagatcccggccggagacttttactgcaagaagtgcacggacgccaacctggccaagcagcgcaaggccgcggccctcggcggcgctaacgctgctgcttcagctgctgctgcagccccagcctctgctcccactagtgctgctgctggcagtactgttgcctctagtaggccgctggcccctgctcccagcgccgtcgcagcccccgctgctacggccgcggccattgcagccgccaccgcgcccaagcccacgatcctcatgaaggagtccaagtacagaggcgtgtccaaagtgtccatgaagggcgtcaagaagcccttcgtggccaagctctggcagggctccaagtacctgcagctcggcaccttcggcagcgagatcgaggcggcccacgcctacgacaaggccgcgctcatgcactacggcaagagcgcgcagctcaacttcccgcacctgcacgacagcttcatccgccccgaggtcgccttcagcgtgcggccgcccaacccgagcgtcgcgcctgcagcacccgctgccactccgtccctggcacaccacgcagacctgtacccgtctcctggacgcgggcggggccgtggacgtgggcgcggccgaggtcgtgggcgtggcaaacgctcccaggaatcccccgacgcgcatgcggccgctgcgcacttggaagctaagcgtcgcaagatggaagaggcggctggagcccaggagaaggcctcgggcgtgccagccaaaaagtacctgggcgtgcaggtgcaccgcgtgtacgcccacgcccagatccacgtgaacggtaaggtcgtcaacctgggcacgttccccacggccaaggatgcagcgatggcgtacgacaaggcggcactgaaattctttggtggcccggtcggctccagcgacgctcgccccgacgaaatcgttctcaatttccctgagaagcgagacgagtttttgaagcaattgctcgaggaagagaagcagaagatggcgcgacaggccagcggctcgagctatgcgagtcgtagtgcgcagaacgccaagtacaacctgtccatcatgaagctgaacgcctggatgtcgaagctgcagcgatcggtgaagatggtggaggcctcgcagagagtgcagtggggtctgcatcccgatgctgtgcaaagtgaggaggatcaagaggaaaagcaagaagaagatgcaacagatgaagtttctgcactggtgaagacggagattttcggctctggacctacgatcaaaaaggagttcacgacgcgggaccagaaattgagacagagcaaaaccgagatccagaatgcggtcgcgctgatgatcgaagagctcaagatttacgcggcggactctcctgtagacccacttttcctggccccaccgcgctgtgcacctattctcgacttgttgtctacgtcgcggcatctgaagttgattagtgcgattaatgaccttgcgcacctcaaagttaaagtggatgggaaagactcagccgcggcagttgacggccagttcgaaagcaagctgcaagctgttgtcgactatcgtgcccgattgcaaatgtcgagcaacaacgagaagcagaaactggcaaattttatgcgcgatttggagagcgtggtgctacctgctccgagtagcaccggagctccagctgctgttgtcggtactgcccccgtttcgacggatgttgtgcctcaggcgacgaaaaagaccgaccttctgaaaactgccaagtacgtgaagcgaaaagtgttcatttctaagccggccaagccagcaagcgttgcagacgatgtcgagccaaaggagccgcttgaccaggccagtcagaaggagggaattagtaaagaagcggccgcgaataatgcatcagaggcagatgtgaagacggaagttgttagtgccgcggagcaacaacaaactgaaagctccactgacgcgacacctgcgaaggaaaacgagactacagcggatgcggaggtgaagggtgcgaatgctggtgaagtcgatggcggtgagaagtcacaaacggatgctgctggtacggcagtatcgcaagatactgctaatgatgatgcggccgaggaggcaaaggaggttgcttccactgatactcctgacgaaggcaaacctgaagagaaggaatccaaggaggataaggaagaagcaactgcagctgaggccaatggtgaaaaggcagatgaggacaagtctgagacgaagaccacaacagaaactgactcggacgagcagaagtcagcagacattgctgaagagaaagggaacgcagagacaccagaggtcgacgagactggcgtggaaaacacggaggatggtaaatccgaagacgccgcttcttctgaaagaaaagcatccagtggcgaacatgaaccagtcgctgcgaagaaggacgatgatgtggtgatggaagacgctgctgagacttcggcatcaaatgccctggttatcccgcaacaggatgaatttgaatggcaattctgcctggctgttcaggtgccacccgtgaaggacagccccacagcaacagaagacgtgtggcgcttgctccctctatcaagcaacaaccagttgggtgagtttgtggaggacgtcttcttgactgaaaaggaggtctcggacatggaagttgcagaggaggaagtatgctcctcttcagctgctcctgacggcaaaactgcgtggatggagcacttgcggcagctgcatgttgaggagagccaagtgaggcagcaaattcagcgtgaaaccaaccaccagcacgcgttgcaaggcatcatgaagatcgaacaagaccgactcaatggcgtttcggtagtgtatcgcgaagctatgcaaaaactggacgctaaaacttcgctggcattgaagaaccatgcgcgtgtgagccaggatgcgcaattggtgaagttgatgcagcactccttcaacccaattctgggtgacttgctcgacaagtgcgaagacgcactgttgaattgtttccgcaaactatctctgcggtttgaggacttcgctcaagaatttgagtactatcgcaacgcgttgctcagtttaatgcgatcgccagggaaggatgttcctgcggtgaagggtgatgccagcccagttgatgctgcggatctggttatggatgatgacagcgtgacaatcaagcgtgaaaacatcgcgaaggtaacgagcgagattgctgatactgatccagcagcatcaccggaagttgtggagcttgtcgacgacagtgaagccattgcgaccgaagagggagatgagtttgaccagttaggcgacagctcggggttgcgtgaagcttatattacgttttacatgggcgaaatggaggctttgtggaaggagcggagttcttcgctcgaaatggtgcaagctatccagcgttctttgctcaataatgcgcttgaagtggcgtcgcctgctaaggctgtggtgccgcagaggccatcaaagacaaagacgtctgacgacgttgagatgaaggtagaggacgaagctgctgaggagaagacggatgagtctgaaaccgaagctcagcccgaggataaagcaaccgaggccacctcagtggagaagtcacaggaagctgcaaacactcccgcggagaccgaaaaagaggcggatgtgaagtcggatgctagcactgaagtcgtcgtgaaaacggagccccaggaggaatccggtaatttccggcgggaacaggagttgcgtgaagcggtcgaatcgtgcttagcgcagtggcagcgtattcagtggccggaggagctgaactcgacgttcttggcacccacaactcctacttcatcgaacgaacctgcagcgatcaagagtgagctgatcaagacacagtctacaattggagcagacggcgatgattcagagtacgagtcgccgtacagcgtgatggacgagctgaagcgtgtgatgatcgacttgacacaagatcaggtggtcccagtcccaccgccagttgagccaacgacactggtggtgtatcaccctgtgttcattaaccaccagacgccaaagaatcaccccgagtgccccgaacgcatggatgtaagtgccgtccgttatcaaaactgtcgtgtaggtgtctctaaccaaactttgtgtgtgtgcttccttttcagcgtgttgtgagcatcctgaatacactggtcaagaaacaccaagatactttgaagcttgaccgtctctcgatgtctcccgaagagttgtgcccgcccgaaactacgctcctgatggtgcattcgccaacttacttgcggcagatgaagcagcggtccattgaggccgggtcgcagacagcctcttctcccacggcatcgtcgccatcgtcgcgcgctttggtcttcgagtccgactcgggtatccgcgaagacgcacccaagcgaagaggcagaaagaaggccgcgctggttggcgcctttggcgctgccagtctcgagcagaatggaatcacgttggacacgttcgtgagcagcaagtcgtgggacgtggcccgtgcagctgcaggcaccgtgtgccttgcggtggaccgtgttgtgcgcaaggagtaccataacgccgtgtgcctggtgcggccaccgggccaccacgttggccgtcacggccggacggaaactgccccatcctcgggcttttgcttactgaacaacgtggtgatcggtgcgacgcacgcgcggctgtacccgtggatccggaaggttgcggtgcttgactgggacattcaccacggaaacggcaccgaggagctgctgaaggacgacccggacgccttcttcgcctccatccacctgtactcgtcggggaaatacttcccaggcacggggaagtcgtgcgagacgggcaacctgatcaacgtggccctcgagaacacaggcgcgggcagcggctcgctcgccttccggtccgcgctggagtcgaaggtgctgccggccatgagggcgttccagccggacatcatcttcatttcggccggcttcgacggccaccgtgacgacattctgggcggcgtagccgccgtcaacaaccccaacgtgcctgccggctacgtggaggaggactacgcgtgggcgacactggaggtgctcaagcttgcggccgaggtgtgcgatggccgcgtggtgtctgtgctggagggcggctacgacgtgcgccgggagaccaactcgctggccaagtctgtggcggcccatgtggcggccatctcggccttcgaagcggcccgacggaatatggacagcagcgccacgggcgacgtggagatgaaggaggaggaggcacctgacgccgcggccactgacgacagcagcgccgccgccatcaagacggagcacccagtcaagacggagcctgtgggtctgctggagaagctgctggccacggacctcacggacggcaacgtgatcatcatcgacgacgaggagaacgaggaggagggcggcgaggcggcccacgacggcgtgcacgacggtgacgacgttgaagacgaagacactggcgaggacgacgaggaagacggcgatggcaatggcgacggcgacgtggcgatggaggacgctgagcccgaggagaagagcgggcaggccatggaggtggccgacagttgaagtgacttgtccttcattgtccctctgtagtgtaaatccgttccgattgggcgttaaaaatcgattttgttgttgtattttcatccaatccaaatttcgcatgttttgtcttctacccagggattcgtagtaataacaaaacatattaatatattaatacatatatatatattgatatatcaacattaatatcccggttgttggtataataatactaataatataataccgaaagatttgtatcgatattaatgcgatattaataaaatgaccaaaataatataccactactagctaccaccacttacggggacaaggatggagactggacctgcgaaggaaaacgtattcaagaagtagagcgctacggatttcaagctgaaggggtggtagtagcgcgcagatagagtacttccgagcgcttgatgaagacatgcgcgatgcagaaatctcagggtctgcttgtggacagaatctgttatcactgatacagaaatctcagggtctgcttgtggacagaatctgttatcattgatacagaaatctcagggtctgcttgtggacagaatctgttatcactgatacagaaatctcagggtctgcttgtggacagaatctgttatcactgatacagaaatctcagggtctgcttgtggacagaatctgttatcactgataacagattctgtctgatagggcgggttagtggaggcaagttagtttggtgctgggctaccaagtggttggaaacaggtcgctactactttaatgcacttcaaagttgtgttgagctgactttttatcaagcgtccctcccgttcttgcgcatggtggacgcttcggcgggcagtggggtgtctggtgtgccgcacttcgcgcgcaggaagcggccgacgctgtcgccgagttgcccgcggtgttgtcgggcgctgctgcgtgctgtttatcaggggctctataacaatttgacagccggcggctgggccgttgtgtccgggttgcacgagccgcaagtgagtgtcgcgtccgtgaccgcgttaatccaagagcttcttgggcgccatctacaggctgaacccgaaggccgtcgcgtagacggccgtgttgtgtgccggtgagccccataaagtggtcctgaacgtggaatccgacgccgataaactgcatgttgtctgctcgacgacaaacagccacggctgcatgacgacgctgggcgtgatgctcctgtcctagcgaccgtagccggtgtattggtgcgtttacacacacgaaggccttgagacagctgtgaagaaggtagtgactctggctccgccccagcgtgcctgactatacagtatacacctgggacacccaaggttgcctttggttgtgagtatacgggtcgcgactcctcgagcccgttggcgtatagtagtttgcagctaacacagaggggggttggcaccttcgaggttttccctcctcaattccaacgttgttcagtgggaagcacgtgtgttcctagcgtcgtcttccnnnnnnnnnnnnnnnnnnnnnnnnnnnnnnnnnnnnnnnnnnnnnnnnnnnnnnnnnnnnnnnnnnnnnnnnnnnnnnnnnnnnnnnnnnnnnnnnnnnnagccggtgtattggtgcgtttacacacacgaaggccttgagacagctgtgaagaaggtagtgactctggctccgccccagcgtgcctgactatacagtatacacctgggacacccaaggttgcctttggttgtgagtatacgggtcgcgactcctcgagcccgttggcgtatagtagtttgcagctaacacagaggggggggttggcaccttcgaggttttccctcctcaattccaacgttgttcagtgggaagcacgtgtgttcctagcgtcgtcttcctgctcactaagctcttcctcctaccaacactcgcctgcgcatcgtgccaccgttgtgtctgggttgcacgagccgcaagtgagtgtcgcgtccgtgaccgcgttaatccaagagcttcttgggcgccatctacaggctgaacccgaaggccgtcgcgtagacggccgtgttgtgtgccggtgagccccataaagtggtcctgaacgtggaatccgacgccgataaactgcatgttgtctgctcgacgacaaacagccacggctgcatgacgacgctgggcgtgatgctcctgtcctagcgaccgtagccggtgtattggtgcgtttacacacacgaaggccttgagacagctgtgaagaaggtagtgactctggctccgccccagcgtgcctgactatacagtatacacctgggacacccaaggttgcctttggttgtgagtatacgggtcgcgactccttgagcccgttggcgtatagtagtttgcagctaacacagagggggggttggcaccttcgaggttttccctcctcaattccaacgttgttcagtgggaagcacgtgtgttcctagcgtcgtcttcctgctcactaagctcttcctcctaccaacactcgcctgcgcatcgtgccaccgttgtgtctgggttgcacgagccgcaagtgagtgtcgcgtccgtgaccgcgttaatccaagagcttcttgggcgccatctacaggctgaacccgaaggccgtcgcgtagacggccgtgttgtgtgccggtgagccccataaagtggtcctgaacgtggaatccgacgccgataaactgcatgttgtctgctcgacgacaaacagccacggctgcatgacgacgctgggcgtgatgctcctgtcctagcgaccgtagccggtgtattggtgcgtttacacacacgaaggccttgagacagctgtgaagaaggtagtgactctggctccgccccagcgtgcctgactatacagtatacacctgggacacccaaggttgcctttggttgtgagtatacgggtcgcgactcctcgagcccgttggcgtatagtagtttgcagctaacacagaggggggggttggcaccttcgaggttttccctcctcaattccaacgttgttcagtgggaagcacgtgtgttcctagcgtcgtcttcctgctcactaagctcttcctcctaccaacactcgcctgcgcatcgtgccaccgttgtgtctgggttgcacgagccgcaagtgagtgtcgcgtccgtgaccgcgttaatccaagagcttcttgggcgccatctacaggctgaacccgaaggccgtcgcgtagacggccgtgttgtgtgccggtgagccccataaagtggtcctgaacgtggaatccgacgccgataaactgcatgttgtctgctcgacgacaaacagccacggctgcatgacgacgctgggcgtgatgctcctgtcctagcgaccgtagccggtgtattggtgcgtttacacacacgaaggccttgagacagctgtgaagaaggtagtgactctggctccgccccagcgtgcctgactatacagtatacacctgggacacccaaggttgcctttggttgtgagtatacgggtcgcgactcgtcgagcccgttggcgtatagtagtttgcagctaacacagaggggggttggcaccttcgaggttttccctcctcaattccaacgttgttcagtgggaagcacgtgtgttcctagcgtcgtcttcctgctcactaagctcttcctcctaccaacactcgcctgcgcatcgtgccaccgttgtgtctgggttgcacgagccgcaagtgagtgtcgcgtccgtgaccgcgttaatccaagagcttcttgggcgccatctacaggctgaacccgaaggccgtcgcgtagacggccgtgttgtgtgccggtgagccccataaagtggtcctgaacgtggaatccgacgccgataaactgcatgttgtctgctcgacgacaaacagccacggctgcatgacgacgctgggcgtgatgctcctgtcctagcgaccgtagccggtgtattggtgcgtttacacacacgaaggccttgagacagctgtgaagaaggtagtgactctggctccgccccagcgtgcctgactatacagtatacacctgggacacccaaggttgcctttggttgtgagtatacgggtcgcgactcctcgagcccgttggcgtatagtagtttgcagctaacacagaggggggttggcaccttcgaggttttccctcctcaattccaacgttgttcagtgggaagcacgtgtgttcctagcgtcgtcttcctgctcactaagctcttcctcctaccaacactcgcctgcgcatcgtgccaccgttgtgtctgggttgcacgagccgcaagtgagtgtcgcgtccgtgaccgcgttaatccaagagcttcttgggcgccatctacaggctgaacccgaaggccgtcgcgtagacggccgtgttgtgtgccggtgagccccataaagtggtcctgaacgtggaatccgacgccgataaactgcatgttgtctgctcgacgacaaacagccacggctgcatgacgacgctgggcgtgatgctcctgtcctagcgaccgtagccggtgtattggtgcgtttacacacacgaaggccttgagacagctgtgaagaaggtagtgactctggctccgccccagcgtgcctgactatacagtatacacctgggacacccaaggttgcctttggttgtgagtatacgggtcgcgactcctcgagcccgttggcgtatagtagtttgcagctaacacagaggggggttggcaccttcgaggttttccctcctcaattccaacgttgttcagtgggaagcacgtgtgttcctagcgtcgtcttcctgctcactaagctcttcctcctaccaacactcgcctgcgcatcgtgccaccgttgtgtctgggttgcacgagccgcaagtgagtgtcgcgtccgtgaccgcgttaatccaagagcttcttgggcgccatctacaggctgaacccgaaggccgtcgcgtagacggccgtgttgtgtgccggtgagccccataaagtggtcctgaacgtggaatccgacgccgataaactgcatgttgtctgctcgacgacaaacagccacggctgcatgacgacgctgggcgtgatgctcctgtcctagcgaccgtagccggtgtattggtgcgtttacacacacgaaggccttgagacagctgtgaagaaggtagtgactctggctccgccccagcgtgcctgactatacagtatacacctgggacacccaaggttgcctttggttgtgagtatacgggtcgcgactcctcgagcccgttggcgtatagtagtttgcagctaacacagaggggggggttggcaccttcgaggttttccctcctcaattccaacgttgttcagtgggaagcacgtgtgttcctagcgtcgtcttcctgctcactaagctcttcctcctaccaacactcgcctgcgcatcgtgccaccgttgtgtctgggttgcacgagccgcaagtgagtgtcgcgtccgtgaccgcgttaatccaagagcttcttgggcgccatctacaggctgaacccgaaggccgtcgcgtagacggccgtgttgtgtgccggtgagccccataaagtggtcctgaacgtggaatccgacgccgataaactgcatgttgtctgctcgacgacaaacagccacggctgcatgacgacgctgggcgtgatgctcctgtcctagcgaccgtagccggtgtattggtgcgtttacacacacgaaggccttgagacagctgcaaccaggttcaccatggacgaggccatcttggcgcgtgcacgagtgctgccatctctctcctcttcagcttccgtggtgggatactttgcctgtgccggcctgccgagtaggcaaagtaaaatcgtacttaatgcatcaaaaattttaatacatattaatatattaatatttgtatgagccctaaatcatgtaatatatttgttataatatattatagtccgatgctgaatattactataatataatagaccaaaatctgcgttaatacgaacccctgcttctaccaaagctttagccattcgcgaacgtggtagcatacataagcagcccgaaatgagcgacccgttctacctggccgacatcctgctggggcgcgtgggcgtgctgcgctccacggccgagagcatcatcctggagctgtgcgaggcgcaggccaagctcgagcccggccaggccgcggacgacgcgctgcgcctcgccatcaagaacaaactggagcgcgtgcagacgaacctcaagctgctgcgcaagctcgtgcccgagttcggtgcgtgggtcgcccttgagctcaatagtagtgcattctaccgcgttctcctttactgacatgtccccttgtgcgtcctccctccctgctcccaccgcgcgcgcagacggcaagacgaagcccatcgagagcgtgaaccagacgcaccgcaacctcatgctcgagtaccactggaagaaccaggtgcaggacatgggcgccaaggcgcaggccgtgtacctggagcagctgggcggcgccttcccgcggctcgagatgctgggcgacgtgcgctgcccgcccacgcccagcagcctcttcgtgcccaagtcgcacaagcgcagccgggtcttcgacccgtacggagagaagcaacccgccacgctcaacgagatgatggactacatgatggccaagaaccgcaagctcaagttcttcaagcatgccgagaccacgcgcggcggccgccgagtcatcaagtccatcaagtgcgagatcaacaaggaggtgacggtgcatctgagcttctgcccgcccatcccggagagcggccccagcggcgagtcgggcgtggccgcgagtcccatgacgccgtccacgcccacgtctccggcctttgccagcggccgcctgcgcagcacgcgcaacaagcacaagaagcagcagcagcagctcgtgaagaagaagaagggcgacatgctcaccaaggccaagctcgccgccgaggaggccaccaagatggagatggaggagctcaagacgcgcatcgcggaggcgcgtgaggccatcaaggagcaggagcaagcgcgagctgctggactgcaggtcaccaagtacattcaacgactgtccatcttcccgtacaacgaggacgctcctctcggcgcgtggtccgagtcctcgcacaaccttttccgtctggtcacgctgcacgggcgtaaggcgctggatcacttccgcaagcagcacccggaaacttgcttctaccacctcttcacgtggctcggctactacgacaagatttaccagacgccgtgctcgttctgcaagaagctgctcgccaaggagagcgaggagtgggcctacgtgcctccgtccttccgtgactacgcgaacggccaggccttccactccaagtgtctacccatcgagtaatgaaatggagctagatattaagcagcgacgcgaggctccagccactcaataagtcgaatgcaccggaaggagggagctcgtagttgtttttgatgttttcttctaggtaagcagctactcgagtcggatcggcagcaagcggccaaaagcaggcggcttggctccgttcggcggggcttgcagtctgatcttgctcgaggccaaatcgcgtggggtaacagtagccgctgaaagtggtggctgggtcctcgtgagctgcttcttgttcgccagtcccatggcgtcgtaggcttccgcgacgaaagctgcaatcaccataagacgattcctttgtgagaaccaacacatctctaaggtggctaccctatctagatagcctgggcacgcaccggcactggggaacgcaggcaccgcatcagctccggccttgcgcatttcttccgggttgatgagcgccgagactgtgtggcgcagcgagatgcggctcgcgcggcccaaattctcggcgatgaaggcgttggcagcctcctgcatctccttggaacgctgcgagccggcatagtatcaattagaacccctcagcagatacgctacatgcactgcccttcgtacctctagcttgagtgtcaagacggagatctccgtggcctcggacgtcagcagacgagcgctgtagggccgacactgcaccttgtccagcgtctcctcgacgatgaacttgcggcccaagcggtccacgtagatccacccgcagtggtcgaagcgcgggcgcagctggaggcgagtgacccacgtgtgcagcgccgccagcggctgcatggccgtgagcttgcgctggaagaagacgaggtcgcccgtctcgagcgtctccatgatggtgtcgtccatggacccggggatgaactcgagcgcctcgccgccaggaggcgcgcgcacctggtagctcatgcgcgtgagcgtcgcgttggcgctccaggcgcccaatccggccagcggcagcagcgccagcactcgggctgccatgatgcttggcggggcaaatgtgagccgatcggtgtgcacgcacgtctatggacctgctcgctggtttgatgggatttgcaacactttcaactgcgagttggctgatgtgcctgtgcatgttgttgttgcccttcactaacgaaaatcgattcatcataggtattcacacataaggtagattcactggcggctgggtcatagttggctccctctctgctgctcctcctcaccctccagtctctccgctaggcgctgcccccgttgccggcgagcgcagcgatctcttgcttgagccgctgcttctcgtggcggaagaacgcgatgtcgcgcagcacgtcctggtccagcgcggggcagacccctccggttcgtgccgccagcgcggccgacgccacgccgttccacgcgagctgctgcgccagctgcgagatcgtcgtgacgacaccgcgcagctcggccagcagcttcagacggcgatcttcctgcagcgtctgcatccgcaggcgcacgtacgcattcgccacctcgcggtcgcactccacgcgcgggagttcaacgtcctcgtccatatcgtcaaaagtgatgaccatgctgtcggctccgcgccctgcagccgccacattggacgggtgaaccgggacgccgttggcagcagctcgggcgttgttgtgccagctcggcgacggctgcgcacgcacctggcggctggtgatggcgcccaccttggccaactggatccgccctgcaggcgtgtcgcacagcatcagctcctcgtcctcgtgcgagtcggccgtgtccgagtcgtcgctggacgtggacgagctgtactcgtccgcgtccgagccggcctcggtgcgccggcgcttgcggggcccacgctcgctgctgagcttgctctgctgcagcagcgccgcgatgaactgcgggttggagctcaagatgtcgtagcagtggcggaagtggaacgactcgaacttgagcttcgggcgcgccgagtccgtctccgagtcgccgctgggcgtcggcggccgctggcgctcctgcacaaacaggcgcacggccgccgcgttggtctcgctgcgctcctcgcggaagagtttggtggcctgcttgacggccttggcgggcttcttgccggcgcgttgcaactgtccacaccacaaaagtgcgacacaaacttctgtcaatcaagtgactcgaccctaagtattatcaacattgctggcagacctcgtccacgagcgacacgaagagcaccatgtccggccggatcccgcgcgaccagcgcgtgtgcagcgagcgcgcgctgcgcggcgccgccgtgacgtcgggcacgacggcctgctcggccgtcacgagcccctggtagcgctgctgcacgcgcttccagagcgcgcagttgtcgctctgcaccacgacgtccccctggttggcgaacacggccagcagcgcgcggcccagccgccggtcgtccgcgtgtgtccagcgctccttgcccctccgcatcttgatgtcgacttctctcttgtctttgaagaagaaaactaaattctgccgacgcacttgcttgggaaaatagaaggcctatgtacagaaccctcaaacccaaacatcccacacaaaaatgttcagcacttttggatggagaatccacccaatcaaagtgcgtaaacggaaaagctgggcgagaggtacacgcttgaactcgctccaaagcagggattcacttcgtacacacgatacaactgacgtcgctcccggggaactccccacgtgtcgtaatacaacatggcacgtattgctgcaacttgatccaagattctttgtacaggaaaaaaaaacttacttgacttatatgcttcgtaatgatggatcggtcgacctaatacttcgttcgttcgttcgttcaagcacccacactcacctcagtacatgtacgcttagcccttacgctccgccgcatcgagcaggtcgagctcctgcttgagacgacgtttctggtcgcggaagaaggtcaagtcctgttgcacctcctccgccagcgccgggtccactcggcttcctgcggccatacccatgggcgacgctgcgccgttgccggtgagctggttgctgagctgcgagatggtctccacaattccacgcagctcggctagcagcttcaaccggtagttggccttttgctgtgtgcgggggttcttgatcacctgcgcactgttcacaacgctaccgttctgagcaccaacgcgagcaacgtggttcttttgtgcggcaggcggttggccagtctgggacacggtgaaacccttggggacgggaacaccttcgtcgctggactcgtcgctcggtgagctcgacgacgacgacccagacgccgaggcggaagcacccgaagatgcttcactgcccttgcgccgctttggggacgcctcgccattgtgaggcgagactctctcgtgcagatcaccactggcatcggaggactcggacgcttcctcagggtcactgccgccaggtttggattggcgacgtcgccgcttctgcatgggggagcgcaccactcgaggcttcttctccgacatgaccgcgcgcatgaagcgcttgctcgtgcgcagcaccgggatgcagtgagggtagcggaacgtcgtggccttggtccgcggcttgggagggggctccaggctctcgaggagcgcctgctgcttggcctccctgtacgcgcgcaaggcttcggcctcctccgcctggcggatggactcgaagcggttgttggcctccaccatgacttctttctcgctccagccctcgtgctcctccttctccacctgcggatttacgtaaaacaaagcttgtcagtttgaaatcttagtgcaaaacgttgcaacaccacccacaagatacgcaccttcactagcagcgacatgaagaaggccgcctcggggcggatgaacgacgaccagtgcgtctgcagcgcgcctccagcgcgaggagcggccgtcgggtcttcttcggcgaccagcgccgcgtagtgcgtgttcacgcgggtccacatgttcttgacgtgctccgtgccgtcgtcatcctgcgtcgcgagcacgaaggcgcggcacaggcggatgtcgtcctcgttggaccacgcggccttgctcttgcggcggttgctcggcgtcagcgacatcgcgtggaatgctggaaggttgaggaatgatgaggaatccaaactttcgtttcagcacgcgacacatacaaaaaacaagacgccgattctgggggacaaagcctggttcattcgaatgatatgtacagattttacccaatggtattcttacccagaggtaatagaaggatgcagagggatgctttcgatgacacaatactgcagtggaatcttgtgtcgtatgtaagcatcggcaagcgatgaacacccggttggttatgcaggtcgacgttaaagcaagttaccaagatagacggctacacaacaaaatgtctcgagccgaccccctcccaaagcccccccacacacactttttgcaggacagcaacttcctgattgttctactgtttgtcaacttcgatcaagtaacttgatggataagagcctatattgacgacgtcaaacacaatcgagcgctagcaggtgtaagtctattgtaaagtctattgtacaaggaaatgaactgttgccaacagtgctcgcattgcgagacgcagcctgcagcaggggtacaaatgtgcacagagaagaattacgtgcgacaaacggtttctacgatagaggtcactaacaaaggaatacgcccattatgtcacaggttgaagcacccatcgagctgcaggaagcgtagaggatgcccaacgaaggaagagataaacttttccgcacgagattgcaggtgtattatcctttgtggaaagtgcttccccgcccagtgtattactctcacagatactactccttgcacgcatgtgtgccaagaaggagtaggatcccatgagagtttaggaaccacagtcgtgcaatgaccacctcatactcgcacacgtacatgtaaccgttggaacctacgccaaccaacaacattcgtcgatggactacttccatgttaaacttctgggtcagcacagcgccaattcgatatctgcaaacgcgtacattcatgtattcctggaagcgttacgttgggtagttgttgaggttcatggttcattcgaacctttcgagaaatctgctcaaatctgctcagtgtaggtggctgcagtgtagccttcaaaaaggatatattgagccccaacgtacccccgagttgttagctatcatgttcaagccggcaagggcaagaaaagttttggaaacccctacccagcggtcgcttcacctcagtaaacaatgttactatgtatccagacgtacgaaaaacagtttttgatggcctgcaactctgtggaagcgagggtctgacctccaaaccacagtgcttgtcaaggaacagcacgaccacactaccgtaccgatcacttcgatgacacgctgaaaaacttcttcgcatggtcgtgttctgaagcagctgtttacaaacttatggtgacttccacgaggaatttccataaatcagtgatttcactgagatttgacaaaatgattgtgatagcttgaaagtactgactcagtgatttggtaaatagtaatactactagtagtatttattcgcttctttcgattactatattatttcgaagtgtacggcgaggctctcgttgggtaaggccccagtcgatgtgaaggaagcagacaccacgacgaaggccgtagcctacttaactatgcgtcgacatgtttccccccttcacaaccgagcagagtcgccgcggtaagagacttgaaagaactgagcaccgatgagatccgacatattaaactaagaacatgaaccgaaaaccttgtaatgtttgcaggtgggtgcggaagtactttgtctttctacgttgtgggaatccgcccctttataggttgccaatacactactagtagttactatatcgcagcacaatacaagggtgcgttgcgttagctgggaggactactttatattccaaaaagtctgctcggttgtatctaacgttagctcgattttaccgactcgagtacaactatatcttccatactggaacactttgaagaaactaatagatgtcttctttggctacgaagtagccaagtcttgtgctaatacctcgcctactgagtggtcgagtgttttggcgccactacaaagctaagccaaatccaaaacatcaagcatcaatacatgcgctagcagtaccaaacagtggttacgtactatgttcacatgcaagtagcaaatgaggggcgaagcccttcatttgcagcgcctaccatcatttttcttagggaaatttcaggaaggtgactcaatattaaaatttgtgcaaaaggtgatagaaggatttgtgtcgagagcacatatttcaggttcagcagcatttgctagggcattggtcacgacattgtttcctccagcggcggcatggggagtaaggcatccaagcatgctttatgcagcgtgggcagtgtcgctcatgcgacacagaaggcgaccatactccaccagaacaactattaggcagagggcgatgcctacaccggcatcgccttcgcgtttacccagtgctatactgacacaattggtgcattcagcgacgtgcatggcagtcaggtgctggccgctatcggtggccaaatgcacttggcacaaagccttgtatcaccttttgcacaaaatttcattttgagtcatattccggaattttccttttttatttggacgcaactatggcgaagctgcctaccggacagattttatagtttgtaggctaagagctaaggacataagcgtttgcagcgccgaccaccattttttatatggatccgatgatctaggctgcccgagatccaggcggacaggtttaatttgtaggccaagagcttagctgcgtggacgtaagacatcctcagttatccgtcagtaacaagaaactatggaatacagtgtagttgtagactgattggtcatcctgcattctcttgtcgctaacgctgtcctcatttcattgtcaattagctttgtgtggtacggtcgggatgtcaatatggctatatttgtgtaagtatggtgtacgattgtgtgagtatggtgtggcgaaatgttgtttaaatgttgcctgagatacaagcaactttttttgacgaattgatctgtgtgaggctgtccatacagctcttctagctgtcctcccaggataatatcatcctcaacgagacttttacacgacctgcgtttattttttttggtaagatgtctctatttacatactacatttattctggggtaggagtaaagctgctagtgcaacctacatccgattatttgtagccgatcaaatgaagacgagagctatgcataggctgggatagctatagaacttagtgtgagcatcttcaccgcggcggcgcagtcactatcgctatcacaattcaacgagatacaaagtcgcgcgcgttgcacgaagaagctctgaaatctacggattacctgttacctacagtatctgtggtatgtaaatttgcgtttccattacaacgcatctcctgctacattgactaagagcctaccaggatgtttatgagcctttcgcccgtcgaccattatcatcttctgcggacccaaacttaactcgcacaacacaatctcgctcaactcgaacgcggttcattcctgagattgcaggatccgtggacccgtggacggaggacctgtagcggatgttgaagcggttggcattccgcaaggctgtcctcattgctactttatcacttttatagggctgggtacttggcttcacaaaaccttggtctattaaagataacatatttcatctgaagctactatcgatgcatgaaaaccaaaaactaggaaggaagggggtatgcgcttcaagcatagttcagatatcacgtaagtgccactggttggtcgcctgtctcgttgcaaccggagtatgtactaataacatcgacagtgatactatattatgtagtattagttgtagtaggtaacatactatttacatgtactatttctagtattactataggtctacatttgacttgcaaattgtatggacgcgctagtacgatactactgatgctgcatcagtgaattcaggcaaactgtcacaatcattttgtcaaatctcagtgaaaatcactgatttatgaaattcctctgacttccacagagcaaacagaatcgcaaagctggttgacagggttgatgtgcttcagcccccgcatacatgtatggggcgggcctcaacacactttcctatgtaaatgtagaaatgtagcgcttgaagccccagcctaaattatcttgctggtgcacgagtaccaatcagcctccatataggcggacagtgaacaacttgttgcttgatcagagtaagcaggtgatacagtaccggtagtaggtagatttgtgcagcaccaacgaggctcgttacgagcagggaaaatatgatgccggcgaatataattctcttaccggtatgcatttactaatggttccccgcagcgtgcagcttggcttgagtacacaaatgcaccggtaccgaatcattaacttgtggttcattgaaaagcaccaaagcaccaggttctacgataagcttacagaatactttagtgctaggtagcattcaggactgccacgtagaccgtcgagcgctcgacctcggaaacacgacatagaggcggtacgtccgagtcgtgcggcgccgacagcttaaccagtgccgctcgcgtcttggaatacagatgcagcacgagcctcgagctgtttgcgagttaaagataccaacaggatttgggagcgtagcggccacacgttcatcgctcgccgacccgatcgtgtcacaatctcaactcgtatgagggtggccataggcaagcggcggcgcgatttcgtaccagttcaccgtcctcaactgtggagggccatcactttgatgaccaccattgattaaccaagtaccactacagtccatggaaagatcggccgtccaaaagcttcctccgcagatctggggctggtgcgctcgccccgtaaaatcttcgctcatgcacatgcccgcagcgtgcccgcatggtggcttacgctcgacgtatggcccaatcgccaggatagcagctcaacgaacatggctgcgttcgtgcatacaaagggcaagagcagttgttaaaatctggttctcgtgatcatgatttacaatcctaaaatgcgcgctgatcattggtcgataagcgctccagccaatcggcgcggcgcgtccgttatggatcgcttcaaacgaggggccgacgtacgcgtcgccacccaaaccattcctccttcgactccgccgagcgcaagccaagccgctaccgaagcaagaacaccagcatcgccacgtagtcatggtcatgggcatcgtgaccgccggcatgggcgccaccaaggcgctgctgagcttctacggctcgctgctctactactgggtgcgcaagggcagctactccgagtgcccgttcttcgccgacgacctgcacgccaagacgtacgtgtactcgatcgcgctgctgaacccgctgtggagccagccgcactaccgccacccgagcttctacaaggacctggtgaccaacctgcgcaacgtggcaatcccgggcacgggcgtgccgctctcgatcgtgagctactcgcgcctgatcctcttccccttcatgctcttcgtgtacccgtggctgtgcgccatcggcgccttcttcgagctgcccaaggagtactcgaacaagcagggcagcatcttcgagcgcttcatccgcaccttcacgcagatcttcgtgtgcccgcagaactggttcgccttctggcgcgtcaactgccacgtcgtgagtctgcacagcctcaagaccgactcgcccggctacctcatggagaacaagtgggacttcctgctcgaggccgagaagcagggcatcgccgtgtcgccctacctcaagacgcccggctcgctggtcgtcaaggaccgcaacgaggagggcggcatgggcatcttcatgttcaagaacgccgtggacggcggtgactggatcatccaggagaagctcgacaactcgcccttcatcaagaaactgctgccggaggtgtcgccgctctcaaccttccgcatcatcacggcctcgcgccacggcctgggtgaggccgaggcgctcaaggacggcggcaacggtgtcaagtcgctgagctgcgtgttccgcgccggtctcgcgggcgcctcgacggaccacaagtccatcatgttcgacgtcgacatggagtcgggcaagatcctcaagggctccaccaccacgcactggtaccgcgtcggcccgcaccacatgttccgcggcaacctgagcgtcggccacgacatcaccaaccaccccgacacgggcgtccccatcacgggcaacgtgatcaaggagatcaagcagatgaaggagctcgccgaggaggcccactacaagctcatgaaggacgtgccgctctgtggctgggacgtggcgctcaccaacctgggcgtgctcctgctggaggtcaacatctcgtgcaacttcttccgcggcaccttcgaccagccctggtacttccagttcctggacgactacttccgccacctcgagaagctgccgacgccctccaagaagtccgactagaccgggggcaaacgctgcgcagtcagtggggccgccgcattcgcctgtattgcacgtctggctggaccttgccaagtgttaaacaaaatgccagccacctcttgcatatgaacatgttgcttgcttacaagcttagctgatgacgccaacactgcgccttcacatctgacaaacctattgcccagcgttcttgcccgacggggtcatgtgagaccaggcaaaggataagatactctgccatgtgagactttgctaaatgtagccatgtcgatgtggtgttgctttgccttccggttggccgcgccgaactccaatggactcggcccacgtgttcgccatctttccgccgacttcagcatggacgacagtctcgaacctgcagcggcggaacgcacgcggctgcctccttgatcatcaggaatgaccgccgacgccaccaccttgtcggacgccgtgctcagcgagctcttcgccttcctcgcggtcgatgaccttttggtgctggaacgcgtgagccgcgcctggagacgcacactggccacggcgcgcttctggagccatgtgcagctcattcacgaatggaacgacagcgagctggcgtccgcagtcatccgcctcgtggccaagcgccacggcccgcaagtcaagaaactgacgctcatcggctgcgtcgtgccgaaggggacgctcgtcaaggcggccaagctcttcaccggtctcacgcacttgacggtgtccggctgccaaaccatcgagaacgtcgacttcaccgcgctcgtgcgagcgtcgagcgagcagctggtggaggtgcgtgcggtcaagtgtctacggctaacggatgcagcactgcaagccgttgccgaaaaccactcccagtctttggagcggatcaacttcagctactgcagacagatttccgaggacggagtggagtcgctggtgcaacgctgcggcaatttgcgctccatcaagctgaaggggtctccagcagtgacgacatctgtggtcgctcacatcgcgcaaagctgtccagcacttgacacgctcctggttggaggagccaagaacctgacggacgaatgcttgctggcccttggagaccactgcccgtggttgacgtcgctggacatttcgcgaagcaatccgtttggatttggccgcggtggcattacagataacgcgttgaagtatctggtcttacgatgcccgcggctagagcaccttactctctgtggacaaggccgattgacgctcgcggtgctgagctctctagcgacctcgtgccccaaactcgagacgctggacatcggcggttgtcgaggaattatctcggatcccatcgctctaggtgccgagctgaagcgcatgggcggacttcatgagctcagcgtcgcgttcacgcgtggtctgaaaggcgagcaaatcgatttcatagcgtcccagtgccctcagctgaaggctttccgcgttgacggagacaatgtagccgctccccacgcatgagcgtgagctattgtatagtgaacgtgtgcaccatgcattacttcaatcccagtatttatgtgaaatgtttttatctggaagttggatcgccttgcgtattctagctagtccacagcgtattcagttttgaagaactcctcgatcgcgtgagctgccgcggagctcagcaccgtcacgtccagaagtttgttcgccccagcttgggcaatcgaggcgatgtttcctactcagtcagtactcagagtgagcggtttcaattggcactcgaagtatctcagaacagcttaccgaaaaggtcgagaagcatatcacactcatcaacgcttagaaacgggaagttgacttgcagcgtctccatcgcgttgttgcgtgtgagcagttcgtcgttcatctgatagagtcgactcgtagctcagcttgtaggtctcaacagcagtaagacaaagctaccttgcggacgtacacgcttgttcagttgttcagccttctcggatatgctataggcgtgcttctcatggacagacacctgcagtgcagatacgtcaaaacacgcccacgttgcagcagtaaattatggcggacgtaccatgagcttcactgcagcagacacactgaagactgtgttcatgcttttctgttagatacatggaggcatacgtgttccgctacatgataacctgtgaacatcttgagctgcactgaattgttgatggcgaggagctgcagctccgagtaccgcgggatcgggaggatactgatagcggatacgttgtcgaatgccttctcgactttcaacagcctgtgcgtcagataagaggaaacagcgttagctgcgtgcatgcagatccaccgcatttcgttatactttcctgtcaatcgtgccctcaagcgaaaatcccggtgcctccctgtgtacgagctaaagaatccgttcatcagcagcaaaacaacgttccgcaatccgtaaacttccttcgcaccatgaacgccacgggagggaactcgccctttcgctgcgagatcatcacgtctgaagtgccgtcaattagccagtcagccgcccgcacgggtaaccgaaatcttgaccatttacctgcaagacacccgctcgcctctatagtcccgccgagcacaccagtcagcaagttgcatcgatgtatgtgcaggttatgaccccactatctcgcctttcgggctgaatccgtagattccctcgagctcctgagccactgcatgtcataactcaagtcaagaactcccctgacaccttcggcaacctcaccacgcagcccgcaccttcgctgggcactgtgcgcgggttgtagagcaccaattgccccctggcacctcggcaacgcgtgatcttcctgcttgccatgctgctggcagattgcggaatgcaacttcaacttgaagaccatcactctaccacaccatcgacacaccacatgatacatgaacggtacatctcacactaagtacgacgattaagtacgtcactaccacacaattgcacgtcaccgaccatcaacaggcatgagcttctggcggggactgcctcggccgctctactgcgtggcgcccatggcgaacgtgacggacgccgcgtttcgccgcctcatcagcgagatcgccaagccgtcagtcatgtggaccgagtttgtcagctgcgaggcgctgacgcacgacccggactcgcgccgccgcatgatgaccacacttaagtacgcggaggtggagcggcctgtggtggcgcagctcttcggctccaagccggaacagttctacgaggtatgggtagatttttattccttaaggtttgtgtaaatatatattgcgatactcacctgctcggtctgctgctgccagtccgccatgatcgtgcgcgacttgggctttgacggcatcgacatcaacatgggctgccccgagaacaatgtgaacaaccagggcagcggcgctgcgttgattctgcagccggacttagcagttgacattgtggctgcgtgcaaacgcggtgctggggacctgccggtgtccgtcaagacacggattggcttccaccacatcgactacaaggactgggtgctgaggctgttggggactgagccggaggtgcttactatccatgggcgaacgcgcgacgagatgtccaaagttccagcacactgggacgtcattggcgaggtagtgacgctggcgaaatcggcgggatccccagcgcttatcctcggcaatggcgacgttgaaagccttgtggacgcgaagaagaaagtggacgagtatggggtggacggcgttatgctcggacgtgcgctatttggcaacccgtggctgttccagggatcctccgacacgactcatgtgcctgtgaaagaaaagctggaggtgatccgacgccacacgcagcttttccaagagatgctggccgacccgggtctcgttggattcccgcgcatgaagaagttttacggctcgtatctcaaaggtgtacccaacgcgcgccagctacgagaccgcatggcgcgcacccaaacaccccaagacgtatacactatcatcgacgaagcgcttgagtacctggcaactcaggaacaagagcaagtttccgcaaactagaagcaacaatacaaatgcaaagtgatcatctatggtatggtattttttttcttcattctgcatgtccccccagcttagctgcaagctgcgtcttcaacctgcagctgaacgagctcgtcctcaacacgggcgtcgagtacctcgtcgggtagaaccttcatggcgctttcgatcatctcacgcagctccggtcggggtcccttcttcgcccactgcgccgagatttcacgcttgaatgccttgccgccgaactcgccgctgcgtaatagcaacatatacgacgtaagtatccgagatccaacgcaaagtaatacgattttaacgtacttgaagagtgacagcagcggcttcatcaacgcagatgtggccatggtgtagggagagtcgcttagaggctcggtagagccccacttcgcctgcaggccttcagcatagtcaagataccgggcaataatctcgcggcgcgacaggtttgggttgcgctcagcgttgaagatcaggcggtcagcgtcacggaagttccacggcgtgttatacgccgcgcggccgatcatgacaccgtcgacgttcgtggtgtccagcagctcgcgcgcgtgctgaatgctctgcacaccgccgttcagcgtgaaggacagctcggggaagtcctgcttcagccgatagacgacatcgtagcgtagcggcgggatggtgcggttgtccttggtgctcagtcccttaagcaggcacttgcgcgcgtgtacaataatgtggcgcacgccggcctccgttacactggagacgtaatgatgaagctcctcgtagctgtcgcaatcgtccacaccgatgcggcacttgaccgtcacttccgccgctggacggtccggattctcttccgcagccaatgcgacgttgcgccgcatactggcgcaaatgtcccgcacgcgctcgggctccagcataagtcgagcaccgaagcagcgactcgaaaccagcgcgctggggcagccagtgttcaggttgatctcacagaagccgccgtacgactggctcagatgcgccgccgctgcatcaacgcaaggtagcacaacatcagcgcacctttttaataagctcaacaacctgcgactacgaaggcgtcgataggaacctcacctccgagatcctcgacgctattgccgccgagctgcagcgccaacggcgcttcgatggggtcgtggcccaggaaatagtcgaggttcttcttctggtgcagcagctacagaacaagaaagcacctcaataagtaagacgtcgtgtgcagttagcagtgtgaaaagtggcgccgacgcaccgtctggtccaccaccatttcggtgaacagcagcgtctccttggtgatcatgcgcatcatgaagcggtagtggcggtccgtccagtccatctacagcattaatagggtagagaatatcagcacatccatagcggcaaaatgtcgttgattgctagctagcggtggcgtaccatgggcgcgacggacaagcgagctaccggcggaagagcagccatcgtcctcctgagcatgctccgatgccaacgattcgctcaggtcgatttttgtaggcttcttaaattctaaatgttaagatttaggaaacatatgtattgatttaaaatggtttcaaatcaaacagtaatgatgtattttacgaacgacgactgaaaactgcagcactcgacgagtgcttttcggaccgagtttctcgccgagaatttctcggtgcgactcgcgcgaatgcacggcgctttcagtacataccgtacggtacctttaccagcaaacaccagaagcgaaggtcgaggtaccgcaacagcatgcaaaaagcattaacatcggagcccagtccaaagccgcagtcacagcgcacgtagtgttgacgtggaggacgcgtgctatcattttaaataagtgcagcctcgctagccgggcgcaatcgcgagctgcccgtgatcatcatggtgtcggcggccgactcggctcgccgagcagtgtcggcgcccgcgtaacgctgcacatcgcggagcacgaccatcgggtcaccgagaagctccggcgagcgccggccgggccctaggatgcaaatggtgcttttgcgccgggagctgccgtcaccaaagcacgctggcagccaatggcctgtcgacacgatctgatcggctggcgggtgcaccatgacgtcaacaggagagttagctgatcttccgccctgcatgggactgctcagcagcagtctgcttgggctcactggtggctccatcacgccacagaaaatagatcgcccacgccaccggcgttagccgcggaggcgagtggtgctgctgccgcagcgccatcgcattgatcgatgctgaaacgacttatctaggcacatgtggcctgggcgaagcaaagtctcctgcaggcgaactggccttttgagactgcacctggataagtccgttttattttctcttctaacgtgcgccacaaatggagagcgcggctgttctggcttgggaacgggccactcgtagatttccactgtcgagctcaagagtccaccacacacctcgcggaagcgggtatcaagagatcacagccgcaattccgcacggatccgtcgaagggctcgtatatatcgaactacaagccagccgccgcttgtccttcctcctttaccttccagtcgaagttatcgccaagacacacagacaaccgcaccatgacgctcagtggacccgtgaagcagcagctcgaggccgcgcgcggctacgtgtacccgacggacggcgcgctcgtgcccgtgagcgccaagaaggtggcggcgcaccagctcctgcacggataccgccaccgcagcgccaaggtctggcacttcctcggtcataagctggcggccatcaagacggtcaagcagcgcaagaaactgctcgaggtcgtggccaagggcgacctggccgaggtcatggacgcgctcaacgccggcgcggagctcacggccaagaactcgctcggccactcgcccgcctacgtggccgcgtccaacggcttccaccacgtgctctcgctgctgctggagcgcggcgccagcgctaccgacgtggccctggacggctccacgccgctgcacgccgcctgcgagaacaaccacgaccgcgcggccaagatcctgctcaagtataacgcgcgcgtggacgtggcggcgctcagcgggtacacgccgctgcacctggcggtcaagcacggccactcggagatcgtgtcgatcctgctcgcggccaaggccaagtacgacttccccgtgcgggacacgaccacgacggcactgctgctggcctgcatggccggccactcgaacgtcgtcgagcagctgctggacgccggcgccgacccgcaggtggaggacgcagagggcaacacgccgctgcactttacgagccgcgacggcaactaccgcgcgacgtacctcctgctgacggccggagcggacccggacatgcccaacgaacaggaccagaccgcgttcgacatggccgaactacagggtcactctcacgtgcagtatctgctcgagacgaacggcatgggcgtggacggccagaccgtggacgagatggacatggcctgcgcgcaggacgcgcggctgagcgagtcgctggcccgcaaccggcccgagatcgccgaggtgatcgtgaagctccacatgaagtacgccagctacttcgccctgggcgcgctgcccgaggacgagcgcgtcacggagttcacggagaaccacaaccagttgctgttttaggcgagctgtcgcctgtgatacgccgcatgtcggtgctattactactctatgtacaaccaacaaacccatgcgcaaactcaagcaagagagttccatgcgaggccggcagtatcagagcctgcctccatatcatcaataaatctagccccaccattcagcacgattccagcgacagaagcggaagcatggcgagcgcgttccattcgatgtgtgtgtgtgagcgcagatagacaaatagactgtatgtgaaacctggaatgtagtcgaagaaatcattcgcttcaaacaaacccgtctggtcattgccgtgtacacacatacttcacgccattagctgatccttcatgccattcacctcgaagacgtggctgtggggcgctcaccacttcgaagagctccatacgggcacgataacttcaacttgatgtggtgtgaaattagaatacacctttgtggctactgcctcctactacttgctcgttgatctacacgcagccggaggacaagaccttgctgcgttggagcacgcggccctccggcgtgtacggccgcgcgttgtactgcttggcatgcacgcggactactcgcggcacgtagcgatcttcctcctcctcgtcttggttctggcagaagcagttgcaaacgttgacacccgcgctcgagaccgacgatgtatccgagtacgagtgccgccgctctgtgtctcgcggcaccactcggctgccccggtgaagttgctgtcctgcgttgatctgtgtggctcctaatgatgctcgcttgctgttcatccgggacctcgcgtgggcttccgttgctgtagccgcggatactccacgtgactccatgcacttctgccggagagactgcggcgtaggcggccgcttcatgtacgcagcgcccttgacactgctggtgacactgccaacagaggatgaggagtaggagcgcacgctgccagcgctgcacgggcgcggcgtataagtggcatcgctacgacccgctaagctcgctgtgtcggcctcgctgggggtactcggtcgctgtcgcgtggagacccgaggaagcgggcgcgcacaggttgagccccttccacttgcaagtgatagtgcctcaaggtgcgggctgttaatgtcgccggtcgacatcgagcacgttggctggagactttggcgcgcactcacgttcttcatcctctgctgatccaccatctctcgcctctgctgcagcatgtgtgtcttgcgtgggttggcagttctcggccgctccttcttgactcgagtcggtggcgtcgcaggacctccctctttggtgctgacggaagacgctgaccctcgacgaggagtaacgcgagatccctggctgttgacacttgcttcagcgataccttccaagccattgctgtcagtagcgtcgtcctcttcctcactgtcgctctgcgtccagattcctccgggcactcgactgttggatggatatgcgggcgggtctacgaactgcaaaaactctttcaggtcgatctctccgttgctgtcctggtcgcacaaggagaagagctgccgcatttgctcgtcactcgcgtagatgccgaacttcgtccgcaggttgaactgcagcccgttcatgcggatgccttggtcccgtccagagcggagcatcttgaacgcgcggcggtactggtcctcgccactcggagtcttctgaacgactttggcctggatctgcttcttgagcgtctcgatggtccagttggaagccgctcccatgttgtccacttcctctgtcgtcgcctgattctggcacgcgaggaactcctgccgggcctcgtgcctgaggcgcgcagccttctgctcgctctcgagctggctcacctcgaaccactgccgcccgtagttgtagtcgggcggcagcacgcggcggatgaactcgtggaggtcaatggtgccgttgccgtcctcgtcgtacttgtcgaacagcaggtgtagctcgctgtcgtccaggataatgccaaacttcattcggagctgctcccggaagctcgggaagtcgatgccttcgccccgagtgccttcgagcaggcggtacgcctgctggtacacgaagttgccggcgatcaaggtcttctcctggatcttctcctgcagcttgcgctccaccttgtccacgttccagcggaagttctgcagcgacgccggcagctcatggccgatggggtctcggaacaagaccttgggcggcgagctgtacagcttggtcttgtccttcttcttcttggtgggtcggccgccggaaccgggcacgcgcttcagcacggcgcctttcattgccgatacgagagccgaccttgggtgggagcctcttgcagagccgcaggacaggacggggatggtcacagacaagaagtaatcgccgcgccaagacactttcgggggagctagggcgccctattaatactcactctccccacagattctcgcctttcatgccatggtggctggaagcgcagtcgtcctcgacctcatactcatacagacaggcaaggggctatacttggcgccgccctctcagcggcaacaaattgaccatcattctgagccttgacgttgaagttgataccgaggatccaacggagtcaggaccgaagaagggagggagggaaggaagaatggaaggttgtccaacgtgcattgcccagggccatgacagctatatcatacaccaagatacccacagcgtttgatacttaatgattctcagtctcagagacccattgcagataccttagcacgactccttccggggttcgcaatacaaaacataagcagcagccatgtggggcaccaagtacagcagcatgggaaaacagtaagcgccggagaatctacctgctgctgcacgcccaaaattggcccggactgctgtcgagatcttgccaggctgatgcagcaaagctgcccgcctcagttccgcttgaccgggaacgtttccactaactaagaagcaccaattccaccgtggcagcaaccatgtttgtattagcaacccccatgtgagtagctcgcagttgaatgagattcattctggtctaggccgccgccacacaaacacagagaatcccagcagactgtttcaagtcgccctggcgttgtcttcgcctgccgcgaccacggaatggtactgtagccatgtgcattttccgccaatcagtcgggcttctcgcgcccgccggggacaacttgcactcgtccatcctccgccatgacgtcgctgagcgctgcgcccccgcccgagggggccgcgcgcttcaatgacgccgactcggacgccaggtacacgctgggcatctgcgtgatggagcgcaaggcgcgctcggcgccgatgctggagatcctggggcgcctgccgcccgagctcttccgcgtcgagttcttcggggacgacacgatcctgaaccggcccgtggaggcctggccgcgctgcgacgcgctcatcgccttcttctccaagggcttcccgctgcagaaggcacaggactacgtggcgctgcgccagcccgtggtggtcaacgacctggccacgcagtacgtgctgcaggaccggcgcgaggtctaccgcgtgctgcaggagcacgacgtgccgacgccgcgccacgtcttcgtgagccgcgacggctacggcggccgcacggagccgcccgaggtcgtggagggcgacgacttcatccaggtggacggcgtgcgcatcaacaagccgttcgtggagaagcccgtagacggcgaggaccacaacatccacatctactaccccatgagcgccggcgggggctgcaagcgcctcttccgcaagatcggcaaccgctcgagcgagtacgacccgcaggtcaacacggtgcgctccggctcgggctcgtacatctacgaggagttcctctccacgcagggaacggacgtcaaggtgtacacggtgggcccgcactacgcgcacgctgaggcgcgcaagtcccccgtgctggacgggcgcgttgtgcgcgacgcggacggcaaggaggtgcggtaccccgtgatgctgtccaccgaggagaagcagatcgcgtaccgagtgtgtcgcgccttcaagcagaccatctgcggattcgacatcttgagggtgcgcgacgcctcgtacgtgtgcgacgtgaacggctggagctttgtcaagaactcggagaagtactacgacgactgcggcatcctgctgacgcagtacctggagcaggcgctggctgggggcacgatggtaggcgacgacttcggcacggacagctcggccttcagctctgtcaccttccgcttcgcgcctgatgcgccgcccccaagcgcagagctgtcggagcccccgacggcgcacagacacgcgatgcttcgcggccagtcctcgtcgatcgccgagtcggaaatatcggaagccgacagcatcacggacggcaacgaagacggactgtaccaagaggaggagcttcgctgcgttctggccgtgatccgacatggcgaccgcacgcccaagcagaagatgaagatgaacgtctgccacccggccttcctgcagttctacgaggatcgactgcgcgaatctcagcaggagaacggtgacggaaatgactccaagaagaagaagaaaatggatctgaagattaaggccgtggcgaacctagagcgcctgctgcaggtgagcaataacctgctgcagaagtacgagtcgcgcgaccctgcgttcatggacttcctcgagcagcgcgaggtcaagtttggggaggacgcgacggaccgcgtcaagggatatcgcacactgagagatgtgctgcagcgctggcagcttgtgggaatcaaccgcaaggtgcagttgaagcccaaagagtttgtggatgtgcctgttgaaggcgcgttggagaatggtgaacagctgacgagacgccgcgtgagcaagttgctactgatcatcaagtggggaggtgatttaacccacacaggcgaagagcaagccgagcatcttggccagaagttccgacgcatgatgtacccgggcggcgctggcggtttgaatcgtcttcactcgacgtaccgccacgacttgaagatctacaccagtgatgaaggtcgtgtccagaagacggcagcgtccttcgctaaggggctgctggagctcgaaggtgacatcattcctatccttgttggacttgtgctgaagtcgaaggacgccgactcgatgctggaccagtctgggtcttcagcccaggaaatcatcatgcgggtaaagcagcgtctgcacaagatcatccaccgcgaggaccattgcagtcaattgattgactccaattcgcggcttattcgctctgtagcccttgcgctaaccaaggtggaccaaccgatcaagaaaatggggatcatgcacaagctactgaactcgctgaaggaacaactgacgcggatgatccaagagaaggcgcagtaccgcacagagatcgaccgatggcaacagaagaaggctcatgctggtcggttgatcgcgcccgccatgggtcggtccgcgagtgtgaacgagctgaaccagccgagaagccgccacgtgcattcctacgccccccggaagcagcacagcgaaggcagtaacattcctagcgacgctgccaacagcagcgtgggcctgcgcaaaatgcgagtacaagaaccgctgtctcctgaggagatcaagtacccagagccctgtggtcgtgagaccctcgaggtgatgcgcgagcggtgggcaaagctgtaccgcgatttctacgttaagaagcgtgacacgtatgacctgtccaaaattccggacatccacgactgcatccgctacgatgcagtccacaacgcgcatctgaacttgaccgacgtgcgcgagctcttggagatctccagcgcgctttcacatgccctcgtgccgcaggaatacggtatcaacgtggatgagaagatcttcattgggtcggcgatgtgtcgaacgctgctgtcgaagattaacaccgatttggatctggctcgcggtcttcgtcccgagcttatgaaggaccacaacacccatcgcctgaatccgtcgtacgccaagcaaatcaagtccacgcaccgctcagtacgcacgcgcctgtattttaccagcgagtcgcatttgcactcattattgaacgtcctgcgctacggtcgggaggaatgtacggtgaagagtcctattggcgaggagtctcggaagtggatcgaagacattcctgaactttgctacatgacgcacttcgtggtgcgggtcttcgagagggttcagtacgcccttacggatcctcagcgcttccgtgtggagatctctgtctctcctggagcggaccaagacccgctggtctccgacccagagaagcaggtcgaagttgcaccgctgaagattatttcacgcgagggcctcacgtgccaggaacttgttgactacgtcgccgactgtatcgactttgccgagcagaacgagatcaaggagatgatcagccgcacggtggcggccaaaggcaacggcagtcccgaaagcacggcgggcggcagcaccaacaccagtggggacgtgacacctgtgaagcgctcgatgtactcgctcagcaacaacagcagcgacagcaactttagcagtgacaactagcctgtcgcctgctttcctcaagacgccaagcgtgttcagtaagtagcctgacattgctgtgtattgggcacgttttacctcgcgatgcaggcaataatacttgtgtgctactgctatatggttgctcttactttattgtgtccgcgcttaggcatgtggtgcgtcctcctgttgctcccaacactccgcgtacgctgccgtctgggcttctgcttgggtattctcaaagccggtgctttctcgtgctgatccaggtgctggcttaatggatggcgaaggtggttgctgctcgcattcctcggggcgaccgccgccacctggtccgcccggcggaactgaagactcaaaccgcgagatctcgtcgtgccgggacttgaggtggaggaactcctcgcgtccatggtccaggtgcaccatctcgtcgttcagatgctccgtttgctcgaactgcgtgatctcacggtgagcaaactcgccgtccagtgactccatgtgcaggacctccgtttggtgccgctccttctccacgagtcgctgcggttggcccttttcgtcgatcttggtgtactcggtgattcgctcctggatggtaacttcgcgcttcttccagagaccaggagccggaggagctcgtgcaactgcatgatgtgcgcgggcggggtcgaaggcgacaagtgcttcgctgagctgctgtgacctggacggtcgaggtggaggagtaggcaagcccccctcgtgccgttgacgctcctcttgggctgctcggaccgccgctgactgtagaaatcgcacgaagtcgtcgaagcccagttgcgtttccttcggacccaagccaaacacttgcaccagcagcagacggcggtacggtggaatggacaggtaagcgcacagctcatccagctccaagaagtcgccacactgtttaggatcgcttctctcgactcgcttccgcagcgactggaattgttcgtgcagcgtctccttcggccgtcgaagattgaacgcgcgtagcaccagaaagtgttgcaacttgatgcgccgctccgcttcacgtgcttctcgtgctgagctctggttcccaagcccatgcagcgctccactcctgttgaagctggcactgctatcccccttagccacagtcatctgtagagcggaactgtggcacactagtaaacgctggtaagtgggtagtgtgtgttgctgtctgcagagttgtagactctcatgcattaaaattagagactagcgcactaccctacagtcgcatcttctgtttcctcgggagtgttgtcgtcctcgtacggccatgcggctaataggtctgcctcgatgtcgttctttacagactcggtgccttgctcttcatcctttctactcagcacaacgcaagcatgcgcgaacgcgcagcgtaagcgaccaagagcaagtcgggaacagagctttccgaggtcgcgctcgatctccacggggtcttctaagcacagccgggcgttgttttgacgagaccaccccttgctggccttcgtcacgacctctttcgtgcgaagactaacgaccgtgagctcgtagccgaattcgcaagtgtagaagcggaaaaagccgcaccggagtgcccgccaatcttgcactgcacgcttagcgtgctcctcgacgcagacaaaggacttgtctacggcttcgaggcgctcgtcaatggcactttcggtcagctcgcgtagactggactcgtcctcgactacgtgggcgctacagtccaagacgggtagtacactgattcgttggagatagtagagcgcaaggagcatcagtccatacgaactcactgctccgccgaccacgcgcttcttggcgtggcgccacttgcgcagccacttgcagagcttcctcacgtgttcaagttgagtttgctcggtagacccgatactagctccaccgtacaacagccgtcgcagcagtcgagtgttccagagagcaggaagattgttcacgcacagatcacacggcaggttgctggacgggtctcggaagttcacaatggggacacgcgccctcgtaacagcagtgacgtgttccttttcatcggtgctgtcgggcagaaagtaaagagtcaaatgctccttcacttccgtgaccagaggcgcagtatcctgccggaactgagcagcagacggcaacaatgcgcacatatccacatcagccgccacgccctcttcatcctcaggaagttccagcaatcgagtcaccgaggaaccaaagagcggcacgcgcgcatcaggccacaggaggcgcagcacattctgcacacggcgagccacttgctgtcgccgttgaagttccttctccatagcttcgtcctccttctcgtcatctagctccgcgccggatgaagctatcttcatatgatccacaaacgaacgtgcatgagtcggcaccagatgtagcagcttccctgtctgtaggcactgcgtcaccaccgctcgttgcatcctcaagccccgctccttcttgtcctgcaccttggtgtcgtcggaggctgtcggaagcagcatcaagtgcaccgccgccttaaccacagccttgtcctccctctgctccgttgactgcagcagccagggccatacaaagcgctgcagcttctcgcgcgttgacagcgactgctcgtccagctccaccaggaactgggccatgaccaaaggggaaatctccgagccagaagtaacggagctcagcagctcctcgcctcgtaaatccaggcgcttagcgtagtgcgccgccgctcggggggcctcccgttccttcaaaatcacccgcacgacggtcgcacgggcttccagcgtgagtccgagcgcgagactctgcgccgcatcccactcgcgactggagcttccctgcagcagtttgttgaggttatcaggcgaggaattcacgggcgctgagcgcgccagacgctccgccttggacttgcgccggcctcggctcttcctgcgcttcggggcggcggcggacggaggggcatcttggtcttggcgcttcattttcggactgattggcgagcggttgaaaatatgtgattggttgttgggtggccaatcaggagtcgagatcacttcaacttcactgcaactattagttgaagtggtgaggagtcacggaccacgtacgtaggaccacatatgtagggctcacaatgtattgcgcacgtagcgcagtgacaaaccacagtggtaagacagccgatggctcgttttgcggcgctctccttcgatagtcgactgggcgttgatttctttcgagacgacgcaccccttcgcgcacaacatcttttcactgtatcgtactacgtagcagctactccgatctggttgcagtttgtttgagcacattcctgtcaaacccacagagcaacagttagcagccatgtcggtgctcgtattaaaaagcccccgacataagacgcgcgcgacgacaacaccttccaagtctgtttcgcacagggtgtcgatatttttacgcgcggctgcaggcagactgcaagccctccatgtatgatgtatgatggcatacctccgtttcaggctttctctccgttattttttgcgtagctaaacttatctccttcaatcgctcacgatacagatatatagctgctgctcttctccatcgacccagcacagacaacccacccgggcagcgcagcgaatcgtttgacgttcgccgccttccaccaagtagcgagggcgccgagattacccctgatccaggctagcggcatcgacaagtgcactcatctctctagctgctttgggccatgacgaccagcttaggagaggcgaatggcgctctgtcccacccaacttccgggccgacgctagagaccatcaaactcccacgcgggggcgtagtagcttgcacgtctatcggccccgtgcagctcggaatgccgcccgaaaccatcaaggattccatgaagctcggtctacccgtaccacggcactacatagtgccttccgagccattcacgaggacgctgggcgccaacatgggcgtgaacgttgccgagttcgagttcccggcctactgcaactttttcttcaagcggcagtgcgtgaaccttatcgtggcgtcggcggatgtcgaaactcgcattcgccaggtcttccaggagacgctctttggaccagtggagctcgatttaagcaatgacttccctcagtccacgccgcctgagcagttccctgatctaagaaaggagctcgagtactttcgaaagtttggcgacaccctcatcactttggacatgctcttgacatttacgcactttgacgagaatggagaggcgagaatctcgcagcctggagcagctagtgacaccgcaccgctcctcattcgcaaaggggatggctgctttaccattgtcgacggcacactcggaagtgtgactctggaggacgctgtcgagttgccgccgccccctgctagtgtgacgaccccgcatctcgactccttttaccctcctgctttcggcgtcacagtgttgggcaattctcacggcttcgacccgaacggcaaaacgtctggctacgtgctgtggattaaccaccgcggcatcatgatcgacccacctccattctcgtcgtcgattctgagtgcgaacaacatacccgcgctcatgatcgacggggtgatcctcactcactgtcacgccgaccacgacgcaggcacctttcagaagattctgcaggaaggccgcgtggctctgatcaccaccgacacgatctatcgctcgttcctgcgcaagtactcggcgctctcgggctttgaaccgagcttcctcgagcgagtactggaccaccgcctcgtgcgcatcaacgacgtgactcagatccgaggtgccgagttccgattcttctactcgctgcactccatcccgtgcgtcggcttcgaggtcacgtacggagacaagaagatcgccttctccggtgaccacctcaacgatgtggagaagatcctccagctcgaaagtgagggggttctctccccctccagagcgcaggaactgctcaacttcccgtggcattgcgacgccattctgcacgaagcaggggtgccaccgattcacacgccgctcaagactctcatggcactagacgaggacattcggaaaaaggtctatgtggtacatacagcagccaaagaccttcctgataactgcggcctgcgcggtgcccccgagggggtgcacaacaccataactctggacgtgcctcgactaccagaacatgcgggggcgctggaaatcctagatctcgtacggaaagtcgacttgtttgcggagctcacgctgaaccacgcgtacgagatcctgcagatggctcgcaaagtcgagtacgccaagggcgagatcgtgagcaagacgggcagcgtgggcgacaccttctacattatcatcgtcggggaggcacaagcagtgcacagcaaagactcgcatcaccaggacggggcgcccaacgccgatccgccttccttagctcactcgccgtcgcaagaaaacatcgctgtccccaagccactagcgcgcgggcgcgatagctgcacccgccgtaggttatcgatgctgtcgcttgccaaacagtaccggccaggcgactacttcgacctccagtcgctcttgacccccaactggctgctgccgtacgatatgatcgcgagtaccaagctgtcgctgctcgaattcaacgcgctcgacttcaactggttcttgcggcggacgtcctcgttcgagcgcatccagcaactggcccagagccggctctacttctcgtacgacatcgtggagagcaaccaggtcttccgacgcctgacgcaggcccagcgcacggcactggagatcatcctgcggccacgcgacgtgacggaggggcaggtgctctggagcattggcaacaggtgctccagcgccgtcatcgtcgacaagggacacttcctgctgaagatcgccccctctgcaggcaccacgaacggcccgtcccccatccggaacgcgtctagcgccggaccctcgcgatcaagacccaactcccccggccagaccctatcgctcatcgctcggaaatccctcaacgtacgtgcgcccgcccttccctcctccacccccaccgacctgcaatgtgtctgctactaacgttctgtgctctgtcggatgtgcagcgcataatccccatggacctgagcctcatgagcagcgccgcagcaggcggcaacaaggccgaggccctgcaggaagtgatgctcagccacggcggcttcgcaggcgacgtggaccgactcacgtgcacggaggacacgacccacgcgacgtcgctcgtgtgcacccacgccggatccgtgttcgtcatccagaagcacgacctgcaggtcttcctgctcgagaacccgggcctgctcctgagtctcagcggcaaagtgttcgccagctagctagctaagttgaagttcgttcgaccaccgaaatctggtaccgatatagtaatctaaatcctaattcctaaatctgtatcacttctacgtagtcgctacctttacgtaagaatacttcacatgtagccatcttactgtaccgcattagcggtacccgatgccaagtgaatcaaaataagagcggttaattagtcccaagcaccccaacgagcaacttgcgccaagaaaaacgaaatccctatgtgaagagtggctcatgttcctgaagttgcaagttggaacaacttgggccactgaaaataattaccatatatgagtactcatgatgtcgccattcttcacttgcacaacacaagcaggtcgccgtcgccccgatccgctgcccatggagcgctcaagccgccgcgaccgctcgcgagaccccgaggaggaccccagcagcgacgcgggcaccaacacgcgccggcgcagccgccgctcgcgcgacacgcgcagctccacggctgactccacgtcggacggcgccgacacggacgccagcacgggtgcgtcccacgcgacagaggcggggccgccggcccagcgccgccctggccgccgccgcggcgctgcagcccgcaaaacagcggaggagacgcgcaagtccacgcgcgagctgcgcagcgccgacgagcgacactcgtcgcgctccggggacgaagaggaggacgaagaggaggacgacaatgaggacaacgaaggacgcaaccgctcgctgtccaacgtgtccaacacgtcgtccacctcggcgtcctcgctggcctctgagccgctcacggaggagcagcgccgcgccagactcgagcagcaggtggccgagctcgagcagaagaagaagatggtggaggacggcacgctggccgagttctgtcgccgcgtcgcggcctttaaggaggagcgcaaccgcttgctgcagaccgctgagctgcacaagaacctgcagctcaagaacggacaggacctgtacaacttcgaggtgcagcgcgcgcaccacctgtgggagaacgagaggaaggtgctgaaggaggagctgctcgccaaggtggacaccgtcatggacaagctgcaggcggagatgaaggcactctcggagccgggcgcgaaggttacggatctgatcaagaagcccgagctgaaaccagcagccgatgacgcagacaaaccgacagtagctgatgctgtggtgaaggcggacatggaggagaacaagaaagcaggcgagcccgagcaggaggagggcgaagtgtcggagccacctgctacgataaaggaagtgcctatcgtcaagcggcgcaaaatggacccgacagcgcctacagatccagttgaggtgtcgaagcttcttccggtcgaagccgtgcgtttgccgttcgacgacctcacgtcggatattgccaccatcgtgggcgaccgcaagcagactgcacagaccacggtggagcgcttaccgaatgctggaaactgtaagatctgcgtcgtcgcagtgtctgcatgatgcggcgtgtatactaagtaagatgttctgtgtttgctgttgcagtgcccttcaagctcgagcgacggaggctgttttgcggcaagtacgtgttcgaagacggggatgaagtgcaggtctcgatgccgctcgtccatgaaaactacacaggcactatctcgtccatcacggacgacgcgctctacatcaagttggcatcagggcagaaggcgcgcatccttctaccgcaccttgaacgtcgccgctgcgagatcaagccgttgctgcgtggcacttcgtccacagggagcctgcacagcatgggctggtccgagtatgacacttcctactaaggtcaccccacgtatcgtgcagagaatcgcacagcatattagtaaatgtgcatgtactacattggtcttttgggtgccgccatctagggcgacggatttcgttatcttctttttgtcgttacccgtgaagcttcgatgtacactacggaggagcagttgtacgtcttggtggctttttgcacgactgctcttgacttgagctcgtctacttggcggtgccaagtaccagcgatcacaccacttcgggatctgctaaatatttatctgcatcatcatgcaccatctaatactcgtgcgccgactgcagcgcgcccatacgcatatgcaacgccacgtccacgctcaatgctccacagtttggctgcctccgcttgacagcatcttgagcaagtcagcgttgcgaccgcgcgcgccttcactcgagccgcggtcttcatccatgtcactatcactatccccttggtactccgcagtgtctatcgagtccgatcgctcgcctcccattcggccgagagtgccgatgacgccgctgccgacgcccacgacgaagcgcttgaagcccagcgccccgctgagggccatcgcgagctgcttcttggccgaaggctttcgctgctcgaaggcctcgtcgtctgcgtcctggctgtgcaggtgcaacctccggcgcttgaggtctctgcgcgcgtccgctcctccgggcaccaccttcttgcggaagcgaatctcaggagacttgaggtgcgacagcgacacatagccaccggaagagctcacgggcggcactggactggcatccgagccttcatgcctaggcgggagcgccgacggcgccgatcgcggcggtggaggcggagggcgcgcatccaagtcgctgctgctgctgctcgaggccgcaaacgacgggtagctgccatacgacgttggcatcgacgcactggtactagccgacgccagctcctcgatgtccggacgcaggaacatggtgaacgcggcactccaccgcagctccgggcgagcgtccactgccctcaggaaccgctggagccgctcgcgccggtggtgcagcaggcgcgggtcgtctccgcgcagatacgagatccagcctccgtccgggaacttgggcagcgcgtcgcgcagcgccgagccgtgtgtctccaccaggtagttgtacagatggcggaagtcggtgtaccgcctcatgacggtgtagcgcaccatgggcggcagctccgggtacgcggcgctgcgctcgtccgccgccaccgtctctggcgcctcactgacgctgctacttctcacgctcaacgcgcgcgccgaggcgccggagctgccgctgctgaagctggacgcgcgcacgtccagcacctcgatgtggtactgccaactggtgttccggcgggtcacgcccgtgatctgcaggtcgcgactggcctctccagcagcctgcagggatgcagcgctcggcggcggcggcgcgggggctgcgcgctcgcgtttggcggcgtgggcggcgctggaagccatgacgaagaggacgaagaggtgtctcgggacaagcgctgcagctcggctcgtagagcgcggagagagattcaaaccactgcgatcgagagaggaaggacagacgaagccgttggcaggcgcagacggcgcgtcgcgggtctctgcgagcaatgaggcgtgctgccggaaggtcgtccgttgcttgagtgctgctacttggtgctctggtggctccagctgcagtgggcatacaaaacctccgtaatcgtcgttactgcctggatacagtaccgtactaagcaccatgcaatgacaacgtatgtcttataagggtttatccaatccaatcatgcgatactcttcattctagcctctgattggcattcttgatctaccaggcgaatcctctggcagccctcaatatgcctcgtcgagctgcgtcgtcgtcggcttccggcgccgctagcaccgcccccacagcacgcgatctcgccgcgcagatactggcgcaatctccgtcgaaagaggtagctgatcgtaccttattagcatgctagatcgctctctaacgctgcgtatttgctcgctattgcttgctactactggctcagtcgctggacgcagttgcggtgctctacgaagagttcctgggagacgccagcaatgacgcaaacaatctgagctgcctccaagagctggacgcgctgcgcttccttgaggacgtgctatggccgctggttgacgtggtggcgtccgcgcgcgactgccggcaccacgtgaagaaagcctggacggtgtccgtgctgctgctcgtgggcttccgcgcgcgcggaggtgatgtaggcagctcctcgggtactactggtgcgtggagcttcttgatggcggaggacgatgggtcctggaagacgttcatgaccacgttgtggacgctgctggacgaggaggacgacgacgccaagtggacgctcaaggagcagacggcgctcacgcaggtcctcatcgcgtgcttccagagcctcgacgtgcagcaggtggcgtcctccgtgctgcagctgacgtcgcttccgctctggtcggcgctgtcgcccgcccagagagcgctcgagttccagacgtaccccaagctggagcgacactggaaccgcatcatgtcggagaattccaccaaggtggaggagaaggaaacgcccaagaagaacaaacgacgcaaactggaggcgacggtagagacggagactccgcgactcgagcagacggcgtttgtgcgtcgccttgacgcgttctttcaggttgtgaaggcgccggtggatgacagcatatccaagtacgagatcacgctccggttacgcttcgtggctctgttcctggcgttgttgatcgacctcttgagccagctgcctacgcgccgcttcctgttggtcgtcttgcggcggaggcatgtgcgaacggtgcttcgaggcagcgccttagtccagcacgcgtcgcagtggcaaagtgctcacgagaggcaagctttggagaagcagctggcacttctggatgcatgcatgattttcccgattgatgcacacacgggcacgtcgctgtctgcacgagagtaccgcgagcaccaagcgcgccacattcaagcgctgcagcagtgcgcattccagtcgttcaggaacacgcgcgtggaggaactggccattgcaccgtgcagtcacatcgctgacgcgtccagttttaccgaaatgctgaacggtatcgtgactgctgatcgctcgcgtctttcgtcgtttgctatcgctgttggcgttctcgccgaccaggctgaagccgaagcgacttctgacaccgaattggtggagtttttcaaagaggagtactcagttggagctagcagtggtgcgctctcgtcgagcgcgccggtgtttcctacagaactggacatttggaacgaaatgctcgaccgaaaggaggcagcgcagacgccggagcaaggagatgatgtcacaggagaaatctacggcgcgaaggatactatcctcttcccggttctgcctctgcgcaagttgggtctgcagttcttgaatctggacgattatctgcaacgaaactatgaacttctccgtttggaagcggctcaggatattcgcgcggaccttgaggttgccatcaagcagcttgacggcgtgcgcgcgctacggacaacaagtgacaatgatacaattttcagggggttctctcgagctgctgtgccggttgcgagtgcgcttcagattgtcaaggtgggcaagccggcgctcggccaaactgccccagcttcagtcattgcacatgtcgaagcggagctctcgggccggcatgatcgcaagcactttgactgctaccagactaaagaggtggtgtttctcgtaacagtcagagccactgctgacgaaggcgccgagatgatgggctttacgaagcaagcgcgggatactggatcattccctgaaaactttggtgtgcagtatgtgcgtgcagcagaggtcatcgaggttttcgatgctgccggaaacgctatcaatgacgaaaatcctgtggggaaaggaagtaagcgtctgttcaagctagcgctggatggcgtgcagtacaaaaaggacttggaagctggccagctcgaggcgtacgagcaggtaaacgtggttgtacgacggaagccgcgtgagaacaacttcaaggctatcctggatacggtaactggagcatggcatgacgccaacaaggaagaactgctacctgcgtggctgcacgatctcttcttgggctatggcgacccggcggcggcactgtacaagtcaatttacaaggccagagctgagaaacagattgttgtaccgatgggtcaactgttgctggatggtgaacatgcagtggaagccggcggggctgagaagcttgtgaatgctgacgatgaagcgcaggtgttagacgcgaaggatgcagtggctccgtttacctatgtggagggcattcgtgatggttccagctatatccgagcgattctcaaggaaggatctgctgcatctccggaaggggcttctcctatccgattcacgaaggcccaggtggcagccgtgcgaagtggtgtctgtgaaggcctcacactagtcgtgggtccaccgggtaccggcaagacggatgtggccgtgcagctcgtattgaacttgtaccgcacgacgccagctcgcgagaaaatcttgattgttgctcactcgaaccaagctctaaatgacttcttcgcgaagattctggcccaaaatgtcattcatgaggcggagattgtgcgaatggggcagccacagcttgtgaacgatggcggtgcagaaagtcaagcacctttccaaggagacttcagtcgcaatggtcgtgttgcgtttttgttggagcgaagagcagccttgcttgccgaggtggagcagatggcccagtggcttatcaagcgcgacgctgcgctttacgccggacttgctggtggctcggcgtcgtattcgtgcgagaacgcgcttatcttttaccagttccacatgaaggcgttccttgaagcagcccgcaacgcgacggagttgccgtcgaaggatgaccatgtcgcagcgctttcggagtttttcgcgttgcgaaaagggtcggcacctggcaagatcgatgcgctccgccaatttgcattcgacatcgagtcgtacttctcagagctgcggcgcctccagccctttgagttgcttcaaaccccacgccagcgtggcgatatgtatctgattcaccacgctcgcattgttgccatgacgtgtactcatgcagcgttgaaccacacgaggctcacagaacttggactgaccttcggaagcctcatcatggaggaggcagcgcaggtgagcgagctggacagtctggtgccgctccttttggcgtgctccaagaaatccggaccgacagcgactgaaagtaaatcgtcgtcgggtctcaagcgtgtcgtgctcatgggggatgcgaagcagctaccgccggtggttaagtctctcgcgcttaagaattacgcccatttcgaccagagcttgttcacgcgtctgctgcgcctcggtgtgccgcaccttgtcctcgaccgtcaaggccgcagtcgccctgagttagcggacatttatcggtggcgctacgatgatatcccctcgactggagacaagcagacgttgggcgacttgcctcgcgtggagtcgaaagctgaataccagactggaaatgtcggatttgcgcacgtggcgcagtttgtggatctctccgggacgtctaaggagcgccagccaaagccctttgccttcgaaaacgaggaggaggcccgattcatcgtcgcactgttcaagtacatgattgggatcggctaccgtgcagatcaagtgaccattctcacgacctacaacgcgcagaaggagctcctgctgcggttactgcgcgccgacgcccctgaagacgccaggacgtgccaggtgtcgactgtggatcgcttccaaggccagcagaatgactttatcctgctgtccacggtgcgcagcgggacttctgtgggccacctccgggacgtgcgtcgcgcttcaacggccttctcacgcgcacgactgggtctgtatgtggtgggctgccgctcaacgctggagcaggcgcgggagctgcagccgttcctgaccaagttagtggcggtggcgaaggaaggagatggtgagaaggcgacgaagctggcgcttgtgccgtcagggcgagttggccaaacggccggtaaagcaaagaagtcgaaggcgaagaagtcgaaggacgtcgtgtacgtctccgaccggacgcagctggagaaggtggtggcggggctgaaggcttaagcttagatagagtttctaaatggtactgttcctatgcgagcgcgtacattttcacagggtacagctcctcggggaagtggcgttgtctacgctccgcgagcaaggtgagcccagcctgctggaagatgctcttgtagtacacggctgagcgcgtgatgctgctatcttgtcggtcgaggtcgtagggctctgccgtctggaatacattctccttgatcaccatgaatccgttgtgcgtcagggcctgcttgcagcgcttcaagtagcgcaccaggtccacgtccgtgagatgcaccagcacccactgcatccagatgaggtcgtagctcgcaggcgccggctcgaagtcctgcagccccatgcagtagaggtccctcacgcgcgcgcgcagcgtctcgtcggcgccgagatactgcggcaccccgcgcagcagccgcggactctgctccaccaggtccacgtgctcgaacatgggcagcagcagcagcttgctcactcggccgatgccggcgccgcagtccgccgccgcgtgacagatccactcgggccgcgccgtgtcgcgcacgtgcttgaggaagcgcttggactcgcggatgtcgacgcccgacacgtgggcgaagcctcccagcaccccgttgtccgtcagggggcagttggcctcgtcgtcccagtactcgtgggcgctggcgtaccacgtcagctcctgcgtctgcggggcgtccgcgctggtctcggccgccgctgcgagctccgcctcctcctgctcgtcgactcggttgggcgcgtcgcccagctccgcctgccacatggcgaacacgctcctgcagttgcagtcaaggtgagagcgttaattgattccatagtagtgtagtgtattggtagtgcgatggactagtggacgcactcgtattcctcatggggctcgatcttgtcggacgcgtccagcgcgcgctgcacttcggtggcgatgacgcgcaactccttccagtccacgcgcgagcggctgcggcgcgatcgatgcagcagcaagggggcagactcgctctcgctctcggccttggtggcgtcggctgcaggaagtgtcgccatggtggcggcggaagatgtgaatgagaaactgtataattcacttgaattgtacagttttcacttttagggctagctttctcagtttagggacatctgaccacaaaaactgagaaatcacgttacgcatgcaaagtgaagttttccaagccccaaaagctctccaaactgcaagcccctggaatacatgtaggctggatggctgtgcagcagaggaaatggttccgaagaatcggaactcaaccggctagtgttggcggcaaaaacgactgggtcgaacagtgaattggctctgtgcaggtcgtggattgttgtcctgacctcggctgtcttctcggcgatcggatggggtcgcagcaccttcaaccgatcaaggctccggagtccggatacatggacgagtgcaaatgtaccaagctctcttgctgcgagctttaatcaagcgccatggttgagctctttatcatcatcatgaacagtgagctgccgtgatgcccgttgttgatctctggatctgcttggctgcaccacgtcctctaccctctcaggctgtttgccccctgttgcaccggtgtgcgtgatgtgcactctcacttgcacagttaagagagccgtgctttgctcttcctgggcctctacccatcggtcacagagcgcgccacctgccagcgccactgacagaggaggcgcagagaccctcaagtcaacaggcaactcgctcggtcttgaaaacgatggttaactgccgccggcgaccgaatgccaagtacaccttgggcaggaacaggatggttcctgcccctcctcaactgtccgagacaattcgactgccctcaacaccagagactgcgattaaaggtggagacgatggcaacgtgaaccggaagaggacgatccgcttcatggacgacgaagcgctcgacgccacggagctcagctccggatcggtctcaccgccgcccgagcgttcgacttcaagctcgaggttctcctccgccaacaccgacatcccgttgcgcttccgccgctacgagggcaaattcgagaaccaacgaggccaatcgctcttctacttcgcgctcttcccgcccgagaagatgcccatgcgcggagtcgtgctgtacatccacggcagcagcagccactgccgccgccacatcgagctgtacaaggagctctgcaaagctggcttcggcgtcatctcgtacgacatggtaaaccacggcgccagtgacctggacgagcacaagacgcgcgcgcacatcagcgacttccggtatctcgtcgacgacaccaacgccttcgtcacgtacgccaagcgctccatctacacggacgcgcttcggtactggcggaaacaccactaccctcgacacccgcacggcgagagcgccagcattgttgcgctgcccgagccgccgcttatcatcgctggatcgtctctcgggtcgctggtgggcatccacactgtcctcactgctcaacacaaattccacgccgctgtcttggcagcgccgacgatcggcgtgacctggaacccgctgctgtacgctgagtcgttgctacccctcgccatgttcatcccaaaggcgcggatcgtgcccgctgtcagccacgacctgttctgtcgggacccggcgttccttgaggcgttcaagaacgacccgttgacttgcacagcaaagatgacggtacgaagtgggacggaagcactgaacgccatcaagcgccttcagaaggacacgcgcgtgacgcagcccgacagcgcgttttgtgccatcccgatgctgttcatcgctgggtcgaacgacggcgtgtccgatcagcaggccgccatccgcttcttcgcatcgatcggcaaccaggacaaggagtttaagctaatcgagggcggattccactttgtgttcgaggatactcagaaggaggctgcgatcgagcacctcttgcagtggcttcgagcgaggttcccacttgagacccgcaacagatagttaggtagttttgtacttagtgtattttgttatcgctgtgaatgaagtaagcgtgaatcgttgatggtcttgcatcaaagtggcgacgaatacgatgcgcttggcccatacattcgtgaatgctttcacagtcaggtatggagccgttcaagttgataaattagcacattttacactcatacactaactacgcagcgcgcactctagagctcgacgatcttgccggcgtagaagcccgcaaactcctcttttgcttggtccatcgaggggagatccgcctcaccgcgctctgggagcggtcctagacgccccaggtggcgcatttcacgcttgaacgcccagttcgtgaacagcacgtggtggccagccacgagcaccccgccttgacgatcctgggtgcggtatttacgcggcacttccactggcggctcgacgtattcctgcaccttgtccgacgtagttgagacgatggacgccgagaagtcgatgatctcggcattgcggggagaaatgtcttcgtccgacgtgtcctcgtccgagctgttgagcggctcttcgtcatcgtagcgcagattcgcagacgactcggcgatgtacttttgcagctcctccttgtagctgtgctcgtcgtacgagtccttcttggcagtcacgacgtcgactttgctttggtggggtgtcagactctttagcgtccgctggatgaagttactcttggccttcgtcggctctgcagcctcctgacgctcgaaaactttttcgagccaaccgtcatgctcggtagtggattcccgggctccgatgtcgctcgctttcacaggcacaagcacgaacggcttcacgtggtcggcggtcgcagtaagcggaggcatcttgtgcggcgtttggtgctgctggctgagctggacgtcgggaattcgagagtgaggtctgcatgggtgactcgagtaacacgggacgatgacgagctagtgcaaagctcaacggatgcccctggtccgtggagccaagtcagattacgccggccctggtctccattggctcaagcagcaacgtcgcccccgaaacctgcacacgagcattgaagcgcagcagatgaacacccgccatctggaggatcaaggctatccgtctccataaggggacgctcgtaagggctccaactccacagccgccgtcgagtgctggtggagtctccggcagtggcgtcggtcgtatcgcagcagaatatccgacaactcgacgcgctcgcttatcaatctctcagctacacgttcatgtatctaagagctcgttgcagtgttggttggagccctccgagaaggtgatcgatcactcactcattcacgcatcctgcaccgcctccccgacccactccgcgcacacttcattgcagggatccaaatattcgagcaagctttactcgcttcggtcgttccgctcaggaaatattttcgccagcaggcttggccaagcggatccgcatcacgaagcgcgtggcctcagcgccgacagcggcagcgtgagccgaggacctcagcaggcaggtggctttttcgcagcccgcgccagttgcgtcgatagcggaggaggcattgcgtgtgcgtgcgtgtccacaatggccacctctgatggcttctgagcccatgtgataatactctcacgtggcgactagcgcagcttagcaattgccacagcaccacccgatcggccagccgccggacaaccacggtcacttaactgagtccggaatggaagttgaagtggccccggtactttgtctgatacacaatgttgtgtaaagcacacaaaactacgaccaaatcgtatgacgtacgatgggcgcgtctccaatatggggcgctacggcaccttcgacggcggtgacggctccagcaccggcagcggggcgcgctgccgcgtgcgtcgtcgcccatcttctccgcctgcgtgcggcgcgtcaggccatgcaagtaccagctccagcgtgaaccatgccgtcccagcagcgagccgaacatgcctcgtggacgaagcctcggcgtcgtggctgtcgcgcctcgggttcatgttcgtggagccgctcgtggcgctcgggggtgcgcgctgtctacgcctgcaggatctgtggacgctcgagccggagaacacggcggagcaggccgagcagcgcttccgcgccgcctaccgcgcgtccgggggcctgctgccggccatttggcatacggagagacacgccatcgtgtgcagcggcggcctggggctgtgctcggcgctgagcgcgtgctgcgtgcccgtgctactgttcaagctgctgacggccgccatggacccgcgcgcgcagcacaagtcggtgctggagctgctgctgctgctcgtgggcatccacgtggccgtgatgctggccgtgctcttcgaccggcacgcgcgcttcaggatgttcaaggcgcagctgcgcgtggtggcgtgcatccgcctgctggtgttcgccaagtcggtggagcggccggtcaagggccgacacggcaccagcaccagcatcgcggccatcgccacgctctactcgtccaacctggtgcaggtgagctggctgctcatccgcttccacgacatgtggacgtccagcgtgcagctcgccgttctgctcttcatcctgcaccgcacgctgcacacaagcgcggcggtgattctgtcgtcgctggccgtcatcatcggcagtctgtcggtgctcacggcgctgtcggcgcggatgctgcagtggtacaccaagaagcgggccaagacgatcgccgccgtgaacgagtgtttcaagggcatccagtccatcaagctgtacgcgtgggaagacaagatcctgtccaagatcatgtccgcgcgtcggaaggaggagaagcgcaagtggtgggaggcctccttccgcatgctgcgctactgctgcgtgtgggaggcgccagcgttcgcgtccgtggccatcttcacgtctctagcagcgcgcgcggggttcttctcgcctgccaccgtgttcacggcgctgattctaattgaccacgtccaggtcgagctgcacgggctgataatggggatccgcgtcatcatcgacggtcgcgttgggctgcgcaagattgaccactatctgcgctactgcgacacgtacgccgacagactcgtgagtgaagccgaagtgggaaccaacgccaagtcgtaccccgaaggtgtggtcgcagccatggataaggtggatctgtccgtggggtatcacttccccacaacggtattggcgaatgtgaatctgcgcgtgaaagctggcgagctggtcgtgatccacggcaaggcaggcgctggcaagacgactctcctgactgcattcctgggtgacgttggatgcgtgaagggcagcgtgtacctgtcgtcgaactacaaggtggcgtattgttcagagcaaccgtggctacagacactcagtatcagggaaaacgtgctgttcggctatgcgtatgatgatgccaagtactatcgtgtgctggatgcgtgctgcctgctggaagaccttgaaagcctcccggacggtgacgccacgatgatcggcccgaagggcatcaacctgtcgggcgggcagaaagctcgcatagcgctcgctcgaacggtgtactccgatgccgatgtgtacctgcttgaccgcccgcttgcgagcgccgacgccatcgtgcaaagtgacgtgtttcgcaaatgcttcctggagttactgcggtacaaaactgttattgtagccacgcacaacccagaggtggtggaatctggctttgtcgaccgattatggtacgtcaatgactcggtcgtatcggagacttgtcgaagagagccctcttctggtgcaacgagtcggcgagctcgtcgccttgccgatatcccgccctggcgcatcggccacggtgacgaaagcaccaccgacgactacgcccctttcgcgatggatgaagaggaaaaggagcatgtgcggagacggatttctcgcccccgagccgcacccaaggtgtctataatgcccaagattgacttaacgcgccgcacaatggatggagttgccaaggagatttggtggccgactcatggacggaactccaccatcatcacttgcgtcctcttcgtcgtgtacggtctggtcgatgtggcgaagaacttgtggttagtgcactggagcaatatgacctggacgtatgccgatatgtggaaggcgatggtggtctacgccatgctgagtgtcggctccttcgtagtactgctggtgagctgcgcggtgatatactacgcgctttccagacgcgccaagcacatcttcagtgaagtgacgcaatctctgctccgcgcgcccatgtctgtgctgtaccaaactccgatcggtgaaatcctggcgcgttactcgaccgacatgcaagtcatcgacggcttgatgtctttccccctgatatttatgttccgaagtactgtgtccattgcggctgcactggggacaatgtgctacctacttggtttgactggcgcgattttcgcggcgctgactgtgtacttgtgccgaggaatggtggataagcgtctatttgcccaagtttactcgctgagagctgaactggaagctgcggacctgaactttgtgtcggaaatgctggatggggccgctgtgattcgttcgttcggagctgagcaagtcaaccgtgtctgcctacaccatggcaagatggtggacgacagatcccggatcgctacggtcgtggaggtgtttacgcattggctgtacattcggtgcagccttctcgtcgcagtgttcctgttctgcttagcgcttctcctcgcgcacgggggtctacaagcaagtacgctggggctcatgctgcattgtatatacagcgtccagcgtgactttgtatcgttctcagtgggcattttgaacagctccgtgaacatgttcagcatcgccaacttgaagaagtttcagcacatcccacctgaagagggtgccgaccgaaaaggtttgcaacggcgtctaggagcgccgctacaatggcctaccactggtgcagtagaattcgaccacgtgttcttccggtacgagacggagcaggacgacgacgacttgtcaacttgtgcgctgaaagacgtctcattctcaatttcaggcggagaaaagatcggtgtcgtggggagaacggggtcgggcaagagctccctcgctatggcgatgctacagatgcacagcttgccgcgtggtcgcattctgatcgatggcgctgacatcagccgacttcatctgcgcgaccttcgtagccgcatctgtatcatccctcagacgccattgttctaccgttgctccattcgccgctatttggacccgttcaaggagttcgatgacgatgcgttgtgggacgtgctcgttaagactgggctctgtgatacacccggaccgactaccgccatcgacgaagaagtacctaacgaggtttacactgcggagtcctctagccgagtggtggtgacgacgttggacataaagttggccgagaacggagaaaactggagcatgggcgaacggcagatgctggtgttagcgcgctcgttgttgaagcctgcgcgcgtacttatcctggacgaggcgttctcttcagtcgaccaagagtgcgacaagaggctgctggaggtcatcgagaaggaattcgcgagctcaaccattttcctcatcacccatcggttggaccaggtcctcggcttcgaccgcatcatcgtcatgcaggatggggccgtcgccgagtgcggagccgctgaggacctcgtcacggaccctgatagcgcgttctacgagtttttggagaccacgttgcttacatattgaggtaggcatacactgtagatgctggatacttaagcaaggtttttgatagacggttttgatttatttcttcacttttcaacatctacaattccgttcgctcagccttcacgtagttgtaagaccgcaccgacggctccagcttcttgactgcgttgatatgagactcgttcgggtgccgggtctcgagcgggaacctcttgtgcagccagttgaccatgtacttgagcacctcctccttctcaggctcctcgtagatcatgtggtagaggccgtcaaagagcttgaactccttgtcgaagctccccactcgggcgtagaacctcatggacgcctgctggtcggacacgcggtcgtcggatccggccatgaacagcatcgggatgtggcagaagcgactatccgggtctgcgactctcgtgtcatcctgaagccgcatcatggcggtgagagattggtggccactgcgcggtgtcatcatgttactgctggtcaatgggtcctcttggaatctcttcaggaactcggggtctcgactccgcaggttgtgctggacggcagggatcaccttcgccgtcgggaaggctgcgaccagggcgcgctgcaccttccactgtgcccacagcactggagtccacgtcacgccaatggacggcgaggcccacaccgcggcgtggaacttgtgtacgcccgaaagcaccgtgtgaagaccgatgagcgctccatacgaagtgcccgagatgatcagcggcagttccggcggtgcgtctcgcttcttcccccttccgtgcgggtggcgaggcttgaggtgcttccgccaataccgaagcgcgaccttgtagatgttggccttggcgaacgtgacaaagtcgttcgtgtcgtccacgaagtcgtcgaagttgctgatgtgcgcgcgtgtgttgaactcgtcgtagtcgctcgcgccgtggttcagcaggtcgtacgtgatcacgccgaagccttccttgcagtagcgttcgtagagcgtcgtgttgcggcggcagtggtcgcccatgccgtgcagatacaaaatgataccccgcagcgccttcttctccggcgggaacagcgagaagtacaagagcgactggccccgacggttctcgaacttgccttcgaagtggcgaggacgcgcagacttcttcgttctcctactgacattggtcgacgccgaagagcctgagcctgaatctgacagcgatctcggtcggacatcctcgtcactggacacgggggcttccttcggccctttagatccgtccgacaatgcgcgttcgcgggtgattgaggagtcttcatcctccgacgggaatcgacgaccgccaccgtgacctcgctgcttggatgctgccgcggacgacgatttcgcgcgtgcggctcttctagctgagcgcagcggggggatcgcgtctcgccgccgcgccgaacgctgtacatcgagcgattgatcgtccgaggacgaggaaggcgagagcgagagttgatccaacgagtcgctggacttggatcgaggcatgcgagagtttgggctcgaggcgggtcgcgttccaaccacccgcggcttccgcgcggtttcagggacaggaccggaagcgagcaggtcttcaaagcaaggcacggggcgcgaccgcagcgactgcgcgaccttcggcttggttggcttgggcttgatggcatctttcgctgccgcctcggccagcagcgaatcgtcaaagcacgaaatcgggcgtgaccggacggaaacagctttcgtgggctgcttggggggtgactgcggagcggtcgtcgagttgccttcgttcatgcacggaacggggcgctggcgtaccgagcgcgccttcatctccttcgccctcgctgccttcagcgctgagactcctgtcatgggggcatcaataatgcacggattgggacgcgcgcgagcggactgagccctcgcaacgcgcttcagtgcctgtgctgtgaaagggtcttcgcccacctcctcgaatttggcgacggagcgcgaccgagcctcacgttgtggcctactctcctccctgtagcttggagctggagcagttgatagggaacgagtcacgcgtggctggtccgggttcgattcgcagctagatatcgacgttgtcggcgacgtcgagcaactcgacggggggctgacggcgacgggagtctctgccgacatattgtcgagactcgcgcgctcccgctcctcctgaatggccgacatggcgagcgcattgcggctctggacgcgccgaatgggaagtccgatcgctcctcgggcgtttgtcatcgttttcggaaatggcgagtcccggaggttcgaccatttggttcaccgagagcagagctcggaggaaggagagagagaccattgccggcgtaccgtaccagcggacggacgatcgcacttggctggctttcgttccgacttgaagaaagccggacgctggcgtcgaaatggggagcgccggccgagatggtgtgtctgttcgagccaacacaaccgatctcgagatttggcccgaggtggcagagcggggccaagcagtatttcagcgccgcaatcccccgcaaaattctcaggcgagcgctcgattgatcgcttgatgctggcgaggaagagcactgtccagcccagaggttttcctagaagtccgaacctcacgacacatgagtgcacgtccattgactcgactttactagaaaaaacatgcatgcacatggataaccaagtttccactacgctgcctaatagctggatacgggcatgtacagtgcaccttcctgtaacttctcaaacgttttgactcgaaaccttgagctattaatagtgggccaccactggtggcaccggtggtggtgcctcctggcggagaccttgaagcgattaacaggatacggacatcgtcgcattgcaggcgttcttcccgagcagtcacatcaccccaccgcggtgacggtcgtgaagggaagctctgctctccacgaaaagcagggtctggttgttgcagccaaaagagattcacaccgggaccgccaccaactgcggctctcgacgctgctgctggtgacctgaccaattccccactttagcgtggttgaacctcgactgacgaattttttggcaaggctttccaactgtaactctcagcgacttcaggctgcttgatgcacaaagcacgtgttggagggatcacgcaacgccagtggcaatcaaagtcagctttcgaattcgaggactcttgagcttcttgtacgtattgactaagcggctactcttcatccaattcatctttgaacagttcgattgaggaaccagtttctcggtattaaaatattttctacgctacttcttactacacgacgatgccgatctactgaggaaacctccggtgcagccactgcgcgaggtacctgaagacgttctccttctcaggctcctcgtagaccaggtgaaacagcccgtcgaacagcttgaactccttgtcgaagttccccatcgtggcgaagaatttgatggcagcctgctgatcggagatgccgtcggctgagcccgccaggaagagcgtcgggacggcgcagaaggcgctgttggggtctgtcacgcgcgcgtcctcctggagctggatcatggcctggagtgactcgtgtccggtgcgcgtcgtcatcatgtccatggaggtgagcgggtctgcctcaaaccgcctcaagaagttcgggtcgcggcacagcagctcgtgctgcacggcaggcaccaccttcgccgtcgggatgatggccgccagcggcttggccagcttggactcggcccagagcagcgggttccacgtgacaccaatggtgggcgagccccagacagcagcgcggaacttgtgtttgcccgacagcaccgtatggatcccgaccaaagagccgaacgaagtgccggcgatgatcagcggcggctccggcagtccattgtgcttcctccagctccgggtcgcgtccgggtagatcgagcgtttggcgaatttgatgaagtcattcgtgtcctccacgaggtggctgaagctgctgatgtgcgcgcgcgtcttgtgctggtccaggtcgctcacgccgtggttgagcaggtcgtacgttatcacaccgaagccttctctgcacaaccgctcgtacagcgcaacgttgcggcggcagtgatcgccgataccgtgcagacacaccacgactccgcgcatggccatcttctcaggcgggaagagtgagaagtaaaacagcgtctgtcctcgtcggttggagaacctgccctcatagtgacgaagccgcagtggggtgcgcgaaccactaccggtaggtcgagatgagggtggtggtgcggacgcaagtgaagacaagctggacgccgacgcggagcggggcatcgagctgtcactgctcggagagttgggctttgggagaagcgaagtggatcggaaggctcgcgagcggcgagacggctcctggcggggctggtccttgttggacggagccagcagcttcgggttcatggtcttggactcgcggcacgacacgacctgcctccgtggatcgatttggctctgagagactggcttcgggtaggacgtcgagcgcgcgcggggcgggggactcacgtcccggaacgcgcgtagtcggcgcttctccatctcttcgctctccgacaacgacgctgatgtggccgatgacttcgcgcggctggcacgcgtagggtcattgcttcgagactgcatccgacggtgcaagcgttcctggtccgagtgatacgccgaagcagcatttgccttcgaacgggacgcgtcacgcggactggacgaagaagtgcgttcgtgttgtgtagtgcttctgtggtggtccctcgacgaggaggaagaaggtgtccttgaggacggcctagggcgcattgttttctctccggaacgtgccggcactgtcgggtcgtggcggcttgacgcccggtggcgctcgtacgcgccctcttccatcctgttgcgtggtgtcaattcgtctgacgaactggtcggcgaattggtagcggatcgatgcgtcgagtggtggcggtgcgtgcgctcgcgttcacgatcgcgctcacgctctcgctgtgtcggcgcggacggagggatggaagaagccttgggacgtgacgaggaagagctggcgtgtcggcgagttggcctcctatgctgatcgcgcgcttcgtcctctgactcggacgagaccgagtgtgaaggcttagagcgcggcactcgctccgggttcgttgaggacgcgcggtgagacgaccgcatgtggcggtagtagtcctgttcgtgtctgctagccgacgacaagtgtcggctggagcgagactcagcttgctgcggttcatacccgtcatccgagcacgtgggggcggtggacgccgagctggaggctgacctggactgctgcaactccgactgcgacttggacactggagactcgggtctcgaacctgtgtaggtggggcgctgctgttgttgttgctgctgctcgaggtctctgctgtcgctgggtctgatgtcgtccgggtgcttctcctggtctttgaggcgcgactcgcgcatgctcgagggctcctccatgatgaccgacatggccagcgcctctcgcgcgcggacgctgttggtcttggcgtgcatgcgctgcatccgactgttgctgccgctgccgctgctcgagagattccgacagctaggcatcgtttttgacaatgcggagccagagcttcgcggctatgatgagctgagaaacagtgaagcgagcgcctgatcgagacgctcgtggctggccgtccgagccgccacgccgaaaccaggaagcacaggaaccagagccagagactgtagccggaggctccatggaccggccggactagccccgtgactgagtttcgcagtgagtcacggcggacaatccgctctcgtgctcgcgatgcggttctgcagcagcacctggtcggccatagcccccgctgcagtcgcagctttgtcgtctctcgatgatcggcgagccgagccatggctgaatgtgacagacaatggcggcggagctgagactcaaagccgccgctcacctgcgcttgggcgaggtgaagctgtgatccgagatttctgcgctgaagccggcgtcgagcacgccgctcgaagctgtcgcatcgacgcccaggaagcgctcattgcccgcttcactggccgcgagagggtgtcgccgcggcagcatcagcaaatctcaagctgcgggtgcgtgcctgccggttgtccagttttgagaccgggttgaaatcaaacacgttcgggacacttatggggcacgatcaaacacaaaaagacttggtcaaaagactgcgtaattgtcgaaaatcaaaacactattcggaccgaatcaaaacaagtttgatgggcgtgtggtccactgtatattaggcttctcctaaaatacagtgatcacacattaaaatgaaaggccacttgcgcagcagtcgagaagagcagacgagactataagttgtccaccgctgtccgccaactgcgctacaagaacgctgaaagacacgagacgcgcgacgagagaactatgtgggaaatcgtcgcttccgggcagaacagtgaaagctacgtaaaagagcgactcgagagaatgtgctgctccagtgcctacgtcaagcgtgttaaggagacgtgccaaatctgcccaggtgaccacgaaatggatgagagacgcatacggtgctcaagtgttacatgcatcgcgttagccgtgcccaagggaaacaagaagccatgtgcgtgaaagtatggaaggtgtggccgtgcccaagcacaaatgcatggagagtccttggtacagcagttgagcatactcttggaagtgctggatgcggtgaggtgcatcgtgcggtgatcacccctgcaatgcgaacgtacatcggagacatggatgaaactggtttggcgccgcggcacatttggtcagggctgcgtcgctacagcgaagctccgccgctgaacggggtgcctacgtatgaacaggtcgctcgatgcgtcaaaagcttgcgagcgaagcatggagagcgaaacacggttcaatcgctgcagaaattggtgcgcgagttccccttacactctggaatagatgcagacaaagcgttcatgtttggagccactctggatgacgatgggtttcctcgtatcgggaagggtgaagacgacgatgctttggtgttgggtgtgtcgacggtgggcctgctgaagaagttgagaagcttccaagagtcgaatattttgctttgtttcatctcgatgctacattcaagctcagcgagatcggttactcggtcattacgtgtggatttagcgactacttcagaaagtatcacctggcggctgtatttgtcgttagccgcttgactcacgtagagtactcctcagttcttgcggccgtgttgcaagtataccacaagttgttctcccagtatcccaagatcgatgcggttcttggcgatgcagaagatgcccagtacaatgcactgcagagctcacctcaattccgaggtgccacatttttaatgtgcttctttcatgtactttacaacgtgagaaagcgaacacgccagcttgatgatgctgccggtgctatggtttacaagggcattattgcgatgcacttttcagtgagccttatggagttctatcaaattcgtgatacgattcgggcacaatggcgaaaagtccgagttctccatgattttgcaaattacttcgacaaacagtggattcaaagtcgttactggcgttggcaagcctttcacacccccactggctacgctacaacgaataacccgtgtgaaacgttcaatgctagtgtcgaacgacatttgatgcggaagatgttcaacacccacggctgcttcgaaaactttcagtgatatgtgaagatgtgacggcagataatttcaaacctgccgcgtcgattggaaacccatcttcgacactagtgaacacggcccgaaaattagtccatgctcagcagttagtgctgtacgagacgggcgaggcgcgtattgtgagaattgttcaattgagctccttcaacaatgagtcgaagcgtttggcagaagcttccaatcaggcttttgtgcggcttatcacgagcaagacaacaggtcagttgtacgagaggcttggacgacggcaacggcgcaaggcttccgctatgcacaatcacgcaatgaagtggtcactgtatatggctcatcgaatgagatgccagcagaagggtggactgtggacattaccaagggcacatgtgaatgtcggtatttcgcgaaaatgggacattgctgtcacgtacttggcgcacagatgctaagaggcgatagacggtattcgggtgggcggtgctgtgaccggcttaaggaccgtcgagtacgcaagaagcagcgaggccaaaccgaggaaggtcgtacaaccgtggaagttcctattgcaacacagccgacactaccgccatcaactgtgactccaagtgagactgcatctgacaacttcacatgtaccgactcggccactgtgctcccacagtttccgttcaacgcgcagcagacctactttcaagggccaacagtcgtccagcaaaccgaaagtccccaactgcctacgatcttcaacgcgaccaattgggggatttcccacatctggggggcttcacgaatgctcgcgtccaacacggcccacgccacgccatttgggcaaggcattgattggcagccaaaccgatcaggccgtcctcctatggcaagaagcgcactagagatccaataccatttttaatgagtcaaaatatcaggatgtattttgaagctttactctatcgctccaatttacaattctttcaccagcacttaaacgtacctagctaggtttctaacgttctaagaaacaatatggccatgtcttgagcttttaaatatacaaagataatataccgatcttgaagaggtgaattttacaaaaagaccttcaacattcttctacaccgcgtattggtgctttcccgcttggtgagtactattcactgcctcacacctttctagcggtaattcaatataaaacggatgcaaattattaatcatatcgcctgcagcttagctggagaacctattatttttagtttgcagtatgaatggatgacactgccagtatggatcgctgaagctgacattatggatcgctaacactgacgctgaagtaacaatcgacacctacgcctgcccgtcccttggtctgtgccagtcctgagccgtgtactttagctcggtgtctggtggctaaggtggcgaccacaatctaatcaacacacgcagatacgcaattgggttgaccgcctcgttcctcgtacagactctgggtcagttgggatcgccggaggtgtttagcgctgacccgacttcctgcctcggtgatctcacttgctctctctctgtcacctcttggggctgctaattacctctgggcggcgacagaagtctggaaccgggctgcaataccggggttgcaacgccgtgaggctgcaatactcactgttcctccggagccaccaccgacacgtaagcgtcaatgctcgctctggtacgtataactacagtcgtgttgcaatcgcgtgcaccaggccggtgtcgcgacttacgctctcgtacttcgttttctctggctcaagggagaaggcgaagtctgccctctcctacacatgcatcttggtctgcggctcttgccgtcctcgtcgtccttgtactgatcgctatcgtcgctgtacttaccgcttgtcgtcctcgctgcgctcatcgctcctgtcgtcctcgcagcactcgctgttcttgtcctcgccgccgtcagcatgccggccaattgtaaatccagttgtaactctgacaatgacagtatggatcgctaacactgacagtatggatcgctgacactgacaatatggatcgctgacattgccagtatggatagctaacactgacagtttggatcgctgacactgacattttggatcgctgacactgacagtatatatcgctgacaatactgagcagtaacaataagaatacaagtaagtcatcagcaaactaaatttcagtgaatttaaaacgcagtcactgtattgcagaggttttcttctattctctttactcttcgtcatcactgctgtcctcctttccactgctgtcctcttcttcactgctctgctcctcctcgctgctttcgtcgtcatcactactgacttcatcctcgatgtcgctctcagcttcggcctcgtcgctgcttgccacgcgaccgtcaccgtcaacagcctcactgtcgtcctccagatcgccgtcttcacgcgcgtcgagatccccgtgaacggttcgtttcggcttctttgggtggcgtcggtggttgtgctgatggtatgcacttcgtttcttgtatggaatatcacaaatactggaatacccaccttggtcgtccgccttctccctttttcctttgtcttctctctgtcggggttgttcttacagaagcggcggtggttgctaagatgacggcgagaatcacattgcatattgcagaactcacacatgtacgtgttgaacactgacgcttctgtagcatccgccttctgcttgatcccgcggactcgcacgtagcaatgcagcctaatgttctccttcttgaactcagcaccagcatgcactaggtcgccacggaaaagcaggaaatcgcccgcatcaagcgtcacggcagtgcatttgtcacggtccacgtaggcgccaaaacacccaggatagatgtaaaagtaggtgttcggcatcagcgatattatcactgacgcctgcaccacacctttctctaaaagagccttgctagtctcaaaggaggggaagtctcggtgaagaccttgtcgtagaccaccgggaagtgacttaagagccgcccacaacttgcgcttcgtataccactcatcctccgactctttcacaattcgtttgatgcacttgtaaattttctcgatggcggggccaaagaccgtgagacctgcttggagccgcttggagtcgcgctccaactcgtacacatcaccgaagattggtcggaactctagggctttcaactcagcaagagcggacttcaaagtagcagcagacaaatgtaggttgccaatcaagtagccgtcgttccaaaagtttgccttgagtattgggtccatattctcttctagcggtggctacagtgctgtgtttcgacttgctgctgtaggcagtgctgctccggtaggtggcagcggcggcgctgcacccgggctctcttctacttgctgctgctggcgttcttcggatagacggtagtgccgagcttctctcgctaaggcagctgctgctgctgttggtggctctcgggtagacagcggcgacggcgccgcgcccctctcgctgctgccgctgactgagctgacactggtggtgtttggccgggctgtggcgacgacgccgcgcttggctttcaggcgacggggctcgcacacgcagcacagtgactccgcgctctcggtgctcgagcaggcagcgaaggcttcgcgcacctctggctgctgctggttctcgggctgggctggcagcgcggcggctccgcggtcttcgttctcgaataggcagcgaacgcttcgcgcacctcttgctgctgctgggactgggctgtgcgcgtgggcacgggtgtgtggccgcccttctgctgcttcttgattgtgactcacgagtcgtaagccttaagtcgggcggcgcttctgcctgagagccttgcctgagagccaatggtggatgtaccgatatgactacagcactgtagcgctgtaacgtggataggcggtggataggctgttttgatgcgggcctcttttagattttgatgtgggcctgatcttgatttgattgtgtacttttctctccagttttccaggcggcctcggcctggacgaggcgtaccggtatcataaacttctgctgtcgggcttggaggtctaagtatttttcagccacttgctatttcagcagactgtagtacacgtggaaacacagccgctcacaacatgtacttgcaggcatgtgtacgtgtacttgcagcactcgcaacagctaagtggtggtaagtctccgtgtgaagttgtacgcactgtaattctgagaatttcgacgctcgctgcgcgaatctcgacacgggaacttccccgggaaggaatgccttgcctatcttgttgtgccgggcagtcaaagtggtagcgaacgtcgcgttactttcgggggaagtctaaagtacccagacgccatgtcaagcacatgtacagcttcacaaacctccattttgcgcttgaagcaagcaaacctcgctgccctagacctccacaccgagagatttgggggcttgaacgtgttcattgcagtgaagcacgaggtcgggaaagcgtgagaaacacaacctacggtaaaatctacaacatgtttttgtacatgcactgtagcgctcggctgctattatgcgagtaagtaagaatgtaaaaaatagtaagaatgtaaaaaatattggaaattatacagaattctgcccgaataaggaacgggtgtacaactaatagcctcacatatttaatattattttccagtcgatgctgcgataggggatgtgcaaggtactgcaaggtactgaggtactaaggtgaaaaacccagtgccaatcatcagctctccaccctcgtttgaaaaatggcgcgcatttagcgatcttactagacttcaaactacatgcaccgtagtgttagactcgcacttttgcttttgcacctcgccccacaagcccacctcctcccccactccacccatttgacagcgctgttgtggtgcgaggatgcctggtcaaaggttagtgattcgaccatacgccactgttggaatcattccggactcgtaggtaaagctgctcttcagttcattttgaaataactaaatcagtacattggaaaagtatactcaacttaacatcaatttatatattctgcgtctttatatatatcaggcgttccttactcgggcagattactgtactcgattttccatcatttcgctcttactcgtacttcgtgaacacgacaacgatggtcgataggtgttcttcgtgttgatactttaatactgtagcgacgctagttgtccgcatcgcgcgactcgaccgggaaccttcgtcgcagccactgcgcgaggtaccggagcacgtcttccttctccgggtcttcatacacgaggtggaagaggccgtcgaacagcttgaactccttgtccaagttgcccatcgaggcgaaaaacctgatagccgcctgttggtcggcgatgccgtcggccgagccggcgaggaagagcatgggcacggcacagaaggcgctgtccgggctcgacacgcgcacgtcctcctgaagccgaatcatggcctgcaaggactcgtggcccgtgcggggcgtcagcatgtccatggatgtcagcgggtccgcccggaagtcctcgaggaaggccgggtctcgacacagcagctcgtgctgcactgcggggacgagcttggccttagggaacaggagcgcgagcggggcggcgagcttcgattccacccacagcagcggcgtccaggtcacgccgatggtcggtgacgcccacacggccgcgtggaatttgtgtcgaccggtgaggacagtgtggagccccacgagggatccgaacgaagtgcctgcaatgatgagagggagttccggggcgacaaagcggtctttgagccgaccgtgcgggtggtgagggtggtggtgctctcgccagtagcggagcacgtccgggtagacacacttcttggcgaacgtgacgaacgcgttagtgtcgtcgacgaggaagcggaagttgtcgatgtgcgcgcgcgtgttgtgcgcgtcgcagtcgctggccccgtggttcagcatgtcgtacgacaggacgccgaagccctcctcgcacaggcgctcgtacagcgggatgtagcgtcggcagtggtctccgaggccgtgcagacaaaggaccacgcctctcatgggcatctcctccggcgggaacaacgcgagatagtacagcgactgcccccgccggttctggaatctaccctcgtagggccggaggtagggcggaatgtgctgcagcctcgagcacccgagcgacgaagaagttgacgccgacttggacgactccgacttggacgaggccttggacgatgtcagatccgcaggcgtcgccgctgccagcgccatggccacaaccgacgcgggcctcgggcctaactggagcttctccatcgtcgggcgcctcaccggcggccgcttgtgcttgtgcattgtcggccgccgcacggtctccgtcggccgcgtgttgagcgtgtcgctccgccgaactggttggcctctgcagttcaccatgttttcgagaatggctctgcgtcaactcgagccacttgagtcgctgctgcgggcccagccggtgcgttcggaatctgctcgtgatggcggcgggcactccgcgtgaaaagggaagggagctggcggtcgccagagcagccattgtatgtacgcgagatcaggcgcaacgatggggggatgccagtcagctcgagctcgcggagtcgcggtggcgcgtgcgatttaaccggcgccggaccttcgccgcgctcggttgtttgaagattgatggcctggaatcacggcgtaggttgcttgcgcgctccagttattgaaggctcgggaacacggcactgtatgatgtacatgtactgtacagcgctgtatcgccggtattatagcgacgacttcaacatggtcctatcctacctcaccgaaatcgacagctgataccatatcggtggtatttcttaggtcttaggatccactgaaaccctcatggccaatcgcatttgagattttcatatttgtaggattgtgtagatggacccttgaatcggggtgaaggcttgaggggctaggacggagccggttgcaagtgggtggagctcacctcgccatggctgagtcaactggccgaggatacggatagccatcaaggtgctgtcagcgcagtcgccgcctccgcccgatctcgcgggaggctctgagtcgtttcgatgcggaggatcccgctggtcctgcaccgaccgcgatttgaatgggccaccatcgcctctacattcatgtgcaaggctgtgcctgccgatttggcccgaaccgggcagtttgcagacgttgctatgggtacaagtactagtatatgcgcagctcgcttccaaggcgttgcagtccaaagcttacgtatgtatgcggagcttccgcaagccctttacttagaggatactgtggaatggcatttattccgtttgcgcggtcggttcatcgccttccttcatccgttcatagcaaccaaggtacatacagtaacttaccctgttcacaccgcgaaccaaggacttcaccgttgggtgtccggcagggtaagacggccgtccacatggctcgtcacatgcgttcgtccatcacggacaggttatcggcattgagcgagaggtaattgtaatcgatccgtttgcaagagtattcgattcatttcatagttctgcagctactgctatcccggtagcagaagatgttaccaagtattgtaggtaggcagtgttgccaacgtcactgacgcagccaccgcagcacgtaggccaccacttcgtctcgctccgggtcttcaaagacgcagtggaagatgccatcgaagaccgcaaagttcttgtcaacgttggccagccggctgaagaattgccgagtcaccccctgatcggcgatgtggtcttcggatcccgtgaggaagagcatccgcagcttgcagaagttgctgcccggctgctcgatcctcttgtctttcatgagtctgttcatggcgctcatggtctgctgcatggtcctggccgtgatgtcctcggtggtcgcgagcgcgtccgccttaaagtcttccaagtaggcgggatcacgccacagcatctcgtagtccagcggcgccacaagccgcacagtcggcacaagcatcgacagcgcctggatgaccgtcgcctgcagcttccacgccatcgacatctccatgccgacggtggccccgccccagaacgcggcctggaactcgtgggaacccgacagcaccgtatgcatgccgagcagcgcgccaaaggacgtacgagcggtggtgactgtgagccagagagcgctttaacctgagggaagatgatttgcttggcgaacgtgacgaaggcgttcgtgtcctccacgaggtgacggaagctgcgcacatgtccgcgcgtcttggacgagtcgcagtggctcgcgccgtggttgaccatgtcgtaggcgattacgccgtagccggcctcgcacaggtgttcatacaggaagacgtagcgccggcagtggtcgcccgagccgtgcaggaagagcacgacgccgtgcatcggccggttctccggcggaaagagcgcgaagtagaagagctactggttgcgtgcattggcgaagcggccctcgaggtgctgcagcgccggcggcaccagcaccacgtacgagctgtagctgggcgacggcgagtcgggggtaaccgtgttcatggcctgctgctcgacaggacgattgcaaagtgatagccagcagcagcggagccgtggagtccaccggggacatgaagcgcagcaaaagctccgacctcgatggtgtagccggagagcacggtctactgtagtacactgtagaccgtctacagtacatcaagggcgtcgtcgtgttgcgcttgggaaggagcggtctctgctgctggagaggaggcgataagtctcggataaggcgcggcttcttgtcggtcgcttcctcatgctcttggagtcccgccatgcagtggcgagtgcttggcatggctgcagcatgcagcaagggtgagcatgtacatttcctccggcactgcagctgtttggggggtcttgagcaacgtgtttgagtgagtaacaaccagcgtagcatttggcgcataaggttgaagttacctgtatggcgatcttctagcggagactttgggggcagcaacgtcgtgttcacagctcgctgaacaagaacacgaccgccgccgtcatgttcatgttcccgcggttgaagtgcgtggaccgcccgccggcgggagtgtgcctgcgtgcatttattccgacaccgtggacgtcggaagctcacgccgcacagaggacacaggacggcgcgaaagctttgaacgcttattatacggcgcgcgctgccgtcctccgcgcctgactaaactggctacgacgcgacatccatcgctcgtgcagagagcccgcgatggtgtgggggcgagcgatttgcctgcattcagcgcctcgttgactccattcgttgagtcctggcgaaagacggcggagagaagaacacgccgcgcgacttgaactgaaccgctcgattctcgccgcgtctagcgtggcaccatcatcaccacttccccagttgcgcgctgcgagctgcagtgtgcgtagctgcctctagtcgatagcagcgcaacccgcaccatgtcgcgcgctgcgtgggcttcgccgtcgtcgtcctcgggctccgtgagcagcagctccttcggcgtgcacgtgccgccgggcctgcgccacttcgagggcaagttccagaacctgcgcggccagggtctcttctacttctcgctctaccctccggccaagcgcgcgctgcgcggcgtggtgctgtatctgcacggcgcgggtgaccactgccggcgctacatcccgctgtacgagcgcctgtgcgaagagggtttcggcgttatcacgtacgacttagtgaatcacggcgccagcgagtgcgacggccacaagacgcgcggacacgtgcgcagcttccgccagctcgtggaagacacggacgtgtacgtggccttcgccaagaacgccatcttcccccagaccggcctcgcggcgccaccgctgatcatctcgggcacgtccttcggctctctcgtggggctgcacgtggtgctctctgggcggcataagttccaggctgcgttctgggccggacccaccgtgggcatggagatgtcgacgctgtggaaggtgcaggccgccttcatccagccgctcgcgttgctgctgccgcgcgtgcgacttgtgccgggcgtggactacgagctgctgtggcgagatcctggcacgctcgaggacttcaaggccgacgcgttggccaccaagagcgacatcaccgcgcgcaccatgcagcagacgctcagcgccatgcaccgtctcaccaaggacaagaccatccagcaggccggcagcggcttctgcgcgctgaaggtgctgttcctcgtgggctcagaggaccacatcgccgaccagggcgtgacccgcaagttcttcgacaaactcgccaacgaggacaaggagttcaaggtctttgacggcgtcttccacagcgtcttcgaggacccggagcgagacgaggtcttcgcctacctctgccggtggctgcagcgccgcttccccgagctccacgccaaagcccgtgatgcatgtatgcattctcctcaatccaagcacaactgcccgagtatataggtgataggactcattgattcatccgggagcatcctacattataatatcacatttaaacgtgacgtgcactagtgtttaccacagggaagctgtgaagggctggcaccgttgctccatactcgtaccatcaccaagtcaacctgttttcaggtccgagactgcagcaacttgttgaacgcgagaaggtgaggagactgctgctgcaaagtgggcggtcgaaacgtcgatcaagcgtgacagcccggaagaaaagctcaggaagtacagaccgcgggggaagactgaagtgactcacttgactgtctagcggtccttactcactgtgaagtgagtatgtagccatcattcgagtgtaccatttacccggtacgaaagtatcttccgcaattgcgcactcacttcaacatgcgccgcggccgccgcgagctggacgagctcaccgcggcgctggcggacgtgcaggcgcgccagcagagcctggcgcgaggcgacgtgctgtctcgcccctccccactccccgcagcagcccatgacctcgccgccccggcgtccggctcgccgccagccgccaaggacatgccgcgtccgcccgcgttccagtggctcaagcgccgcgtcgtgcgccgcagcgagcgcaaggacagcgccctggaggacttgggcagcctcgagctcgtcgcgtcggcgtcgctggtcacggtgcgcgcgctcattggccagttcatcgcgctgccgcctcgccgcgagttccagttcgtgcacccgacgaccaacgcgccggtggacggcgcgcaggagaaggatgtccgagccgccgacctggcctttatctgcatcgtgctgttgccgccgagagaggttgcagtgactggagacgcccccactggtttggatgtggagcagcagcaccggcggcaacgcccagacacggcgcacccccagcagccacagccgccgcagcagacgaagcttccatcatggatttcggacacacgtgtggctgcacgaccaagaactgctgctagtacggttgtggctgctgctgttgctccgtcgaagcgcgttttgccagataaggtgagcactacccgagagcaacaaactgcggtcattcgtgcgaaagaagtgaagaagagctacgctatcagcttagctgatggcaagaaggaagaggggcatctgcgcgtttcacataaagcagttgaagcgaagacggtgggtggaggagtgacgccttatctcgatgccaagcgagccggcagtgccggactgcgggtggaacggaagacgaagcggtaccatgataaaagcacagatgagagtactattgtggtggtaccacgagggcggagggtagccgctcgacttccgagtggagaaagtactcgccctgcatctccgagcgagtcacaatccaccttggctgccactgaagatgcagcagttgcacctgctgacgtcaaagtgatgaaagaagaagctcttgctctggcgagtttagcacaagacagccaggaagaggcacgtggagatgttccccagacagcctctagttttgatgctgctgctaagctcgaccctgtgttggaaacgtcaacctcttcggaaaggctgatcagtcagacaccagggcatttacgtcggtctaggcgtttcaagacgcttactgctgcaaagcttgccgagcaaagttggagtagcgaggagtcggagcagcaagaagtggccagcgacgagcaagtcgaagagcttgttctatcgttcctggagatttttcgttcgggcatgggagaaattggagctcagcaacttgatgcagcgcttctgtactatggaattgactatcgcgagcttgaattaaacggattgctgttggcgctggattcggagctcagtagccgatgcaatcacgtgcaaggtggcgtggacggacaactcatgcaagttttgctgaagatattccctgttgagaaaggaaatgggatagatcccgagtcccttcaacgctttgaatacgcgcttaacctgttcgctggcatgagagggtggaagtcgccgtcaaaactgcgggcttgctgctttgaagagaagcaacctctgcagttgataccagttaccgacagtaggagattgaatttgcttcgtctatcggacaaagatcgtcagctgtttgggatggcgagctcgagtaattctacggtggggctcgagagatggctagctgatggtctggaggtgacttatatactgttgtacgggtttctacaatcacggagaaatgcagggccgaagtccctggcaaagctggaaaatctccacacgcgccaagaccgcattcaagcggcaacccagaagctctcctctttcagttttgacgtatggaagagattagaatttcgcacaacagacgttgaagatgtctccatggtgaagcgcctgaacgagctggtaaaagggtttctgcgcgatgctaagcaatacagtcgagagatcgatgggaccgtgttctttcctgcaattgtcgattatttggccagaaagtcagagcaactcgcacaaagtttgtcggggctgctcacatcaactcatggtagtcgggagtcactacacagcaccgtgaaggcgtacctaggttcgttacgcgggcaactggagcagcataaactccattcagccggtccagacgtctacttgtcaaacatcggtttgaaaatcgttgacgtggataagattaatgcgtcccgaagcagtacaggcctgggaagaatttacatggatgggaaagagtccatattgactcatcaccagtgcaagctcatgatgagatatgggggcttgcgggtacgaggtcggtgggaagagccggaattaatcaaaggagacatatccaggtacgcacactgctctctgctttaagcatcatgcgcttcagtaacattttccttcaggtattttttcattggaccgaaagaagttgctctggagtacacttacttacgaacaaaatctgcagctagtggcggcgatgaaatgcactgggaagactgtgaaacatttgcgaagaaagaagcacagcatgcttttaccttcttctgcaatagccctccggtggtacctacgaatgtcgcgatcggaattgggatcaatgttatccattctgatcttcttccccacctttgctcggtgttgtcactcagcgcggtgttgcgggaatattctgatgcaacatcggtctcgtttggatactgctttgaaccggccatccaggcgacccgagttgctttccgagtacacacagagttttccgctggtaaacaaagtttcgatagcggagcaggcgtgtggtgggaacttccaagcgccaccagaagagtgaaccggtttcttgagtcagcgcaagaagaagaggtggttgcattctgtaatgctggaggcttaaggttcctgcattcgcttttggaaggacaagaactaccgtggcacttggtgaagttcggacaaccgtttattgactacatccgagggaaatgtggacaagaccctgagtatcttcgcgaagatgtcctgcgggcgatacaagccactatcccggtgcttcctcacgcaccacaatgtatcacgaaggagaacatccagattattgtacatttgctagaggtactacccgacgcattagatatcgcagacgatgccgttaacgcgctgcaagcaatatgctcaaatgtccaacagcccaagtttaacggggtacaaggctcattttcagctgtcatgatgacagaagcccaggtgagtttggcgagggctgactatgtgtttaaactatttttcgcatcttgcgaagtactaatctgtactcgtcttatgtgcgtagaaagcgttcactacgcattgcggtctggagatcctagcgaatgctaccaaaaaaatgcaacatcttcctgcacgcaaggagtcagttgaggttgcaattgtcgctcttctgatggcatatgagcttagtgcaacaaaaagtggcctactcacccattggcgcgattatctcgagttttatgtcgggaagaaggcctgggagagacatccatcgagcccaacattttcggcattccttctccagcaaattcacgcccattttttcacggggagatcgttcaaagaaccagagacggaatcgtgtccttgtggatgcaatacgcgtgtggagagcaacacggatgcatgtgttggtgtgatgacaatttttgggaagctgatcatcaccgatgcaggtgtaacgtgggctcaagaagagatgcggggaccacgggattgcgtgttgtttttgttatggagtgtacaacaaggtcactggatccccgcaatggtcgagctgcatgacctgttctttcaaaacttgtgggaatttcttgagcgcatgacaagcccgcaccagtacctacggctactatcggagctaacatccccacttctcgagctcttgcagcagaaggctcacccttcgttgcatactggaacactacgcgttctgagtttcgcgtttcggctggcggtggacaagaaagtgtggcttatctcgatggaaacgtttctcgcatcattttatcagattttggcatgtctctgtgaggatccttcgctctcacgcatgaatttgatcatggttgatgtgctgtttcattcggagtatcaccagcccgaccccagcaatattttgctactactgcatgaagagcacgtgaactttgttggtggatcagggcagttgtctcctgtggcgcgctcacgtacaaagtccttggtacaaacactggtttcattctgttcgttgacttggaactcggttcttcagccggtttgtcaaataccagctttaatcactcttgggtggatgctgacgaatctcgaagttgccagtgatttagaaaagttggaggtggatgaggtcctgcttactcttattgagagtgagagtaccgcagtgtcaataatggcttctcgagcatacgtgatgttccttttccaaggattactgtcgagaagagcattggacgagtaccgagtgaagcggcttttcaatctgcttactaccactttagcttcaggatctcgtctaatgctttctccgaaacgatcaggtgttaatcgggagactccggagacgattcagttcgctgcaaatacgcaggattcttactcaattctttaccgttacatagaagtcaataaaatgcgcatacgagagaaagaagtggaccaggaggatgcaccggtagagggacgttcactggatgctgctatctgggagtctagtgaatggaacgatcccaaccgcgctatcgccgagaagcttgcaacccacctgaaaattcttgttgtctactcgtccatgacagccaacgtggtttcaatcggagatagcgacgagttacgggagattattcttttacttgtggtacgtatttaacgataagctttgcaatcatcatctttacgaaaggaagctagctaactaactaactgatgcgcaccattcagcggtttgtccgagaacgcatgcacagtacctcttaccatactacgttgcacttgctttcgctgcggaatatcatatgggcaacccgtttagatgttgcgagatggggtatatcggaattgattgaggcttcattccttcgaaagctactgcttctggccaaggacaaactacaccaggtacgatattagattgcgttgtcgctagctttactcccactcataagacctcttgtctgcacgtaggaattggcgtcaggcgttttatggggccttgcggatgcctacgagaactctaacgtgttcatactctcgtttgaggttgacgatgctatggctacaggcagctattttacgaaaaagatcggactcgcggtgatggtcgacattatggcatcaaaattggcgagtggccgatccgtcgaaaatgattcgggcgctctggcctccatgattgccaacccaacaagcggtccatttttccttacgaattatgggtattcatttaccctaaagctgattgaatcaatgctgcggttggttcgagctggccacatgatcgacccaagagatgaacactcagcccagatgggaggtgaagtgtttggaacgtcactgttttacgtacatccaatcatttatcgaggagagagagagctctttcaattatgtcgcgctgcagtttacacgcttgaggcaatgcaacggataaaccctgactcagttctggacgaagcagcaagaacgaggctgacaatgcttcaactgctcgactaccctaacaagcaaattgctaattttgccgtttcttgctgcatcattcacctgcaaacccacccaacaaagtgcacaaaactcttcgaggctgaagttcaagataaggtgatcgcatttttctttgacagctacccaccgatccagattgctgcgttctcctgcttgaagctggcttttgcagaccaaaagaatttggccattctccagctcaaactttcgccactcattcaaaaaattgtctcgagtttgcgcagcccaaattttgaagtgaaacgaaaggtctgtaaactactaatgctgcaggacttttaagttaaagcgactaacgaacgatggtgtgggcaggttattttgttcttagtagaagccgtatttcgtctggatgatcaaaacttcttggaaggtgtcgcagaagcattcggctcacaggacaacaaagagctgataatggagctttttgagtctttctcaaaagaaatcgcggcaaacccttcggcaggaagtgtgctccagcttctcgtaagattgattctaaagctagatcttgttcatacgggtggtgatcagctggtcgacgtcatttgcctcacgctgaaaacccacagcaatgacacgtttctccgccccatggtacgaagctccgaacgaaccgcactttgtaacagctacgtccttctgactcctgtgttgtttcgattcagctatttaattttttgcaccagatagtaacccagggtgatcgcgtcaactacttggagcggaaaagccggctcgatgctatcacccagctgctatcgcagcaattgacgcagaacgagttgcgaaatgtggctagcatgctcttcctagctgcagacaaccatgatggcattcgtcactatcttagtggcttctcatcaaactgtatcccgaaacttgtcgacgtcatgggcggattttccgagtatatccaaggtaatgacgtacccaagatgcaacaagaccgcagtgcacgggaagatatggcagaagggatttccgatgagaaagagcctgcaaagcacccagcaagttactttttaagggtgacagctgcaaaagcagtgtgcatatccttctttaccgatgacatatatgagcaggtaagcaagtctacaactatttagagttagtacctaccgaatggctaacaattaggaattagtttctgcaactgctgctgctgctagttacagggcccgaatttagttcggaggagcggtatgggtgtttgtgtgaaggcgacgggtgcttaaaatgcgacccatgtgatatcattgcaaaggtaaactacttcctatgctctaaagaaacaatgaaaatctgacccttgagtgattgcgtggtttaggctcactgtggacacgttattcttcgtctttcgacagcggagcgtgtcttgtgcccttcgtacaatgtttctcacttggtatcggcaaaaggagacgcagctgccagtgttcagcgtctgagcatcacaattcttgaaatcttagcggcgaaccaccaaagtcgagggcagctcattcgtggatcggctgcactagaatggtcgtggatcccgctattgacgagatgtgccattattccagattgttggtcacatgatgcggacgcggattcgatcaccgtcactgcggcccaaactattcagatgttcggccatttaagtggtgcaaaaggtcaggtttactgctgatcgcgttttatgatgcacttaccgatgcacttatttgttttacggcaattgactgaagcagaagttgcgctgaggttagcggccgagaagccgtttattgctatgctgttttcatacctcactcccacgtatgtgctttgaagtagtacaatattactgtgtgcactaaatgcaagcacgcggtttactaactgtattatggatgttgtccattccgtgatgcagggacatgctgttcgctagaaatgtagaggttcgccgagcgtcgtcattcacactggcaaggcttgctgaatatccattagttgtccgagacccgtttttccaagagaaaatggcgatgctggctcacgtagcgttgaattatggtgagccccaggattctagcggagagcacgaccaggtcgtattggccaacaaactgattcttacccgcaacagagccttattgacaccaggcttacaagggagaagtgcggacgacgatattctgtcgctattgatgaggctgctgctgtccaacgaggttgattccaatgacgtgggagatttgtgcgcggatgtactagcgcatttattatacttccgggtaaacgcgcgcgatgaaaaacgtcttcgctcagttatgtggcgctacacgcgtgctatgagcccaaataagtctggagaactccccaactacccgtcttccaagcgattaacagcatatcttcacaactggctggaaccgatgctgcagaaattgcagcagtcgagctttggtgcgtttcatggagaatctacgaagctgttgagagaggagctggtgtccacatgcaagcacttcaaggatccttcaatcagtgagttcttgcgcgtgttggtagagctccaccttcgtccatcccttagtgacactacggaatggatgatggccagcaatgtcatcgatgccgcaaatactggtgcgatcgtgccctacaagtgcgaaaactcgcatccttcaagacctcgttacctgcagtatatttttatggcatccgatcgatcatcacgggaaccaaatgaccacagcttccgtggatctgctcacttgtggcatttcctgaaaaaactctgggaattagcaagtgatgaagaacgaaacaatgaaaaggcccaaattgcgaggtcgatggtgagagatttcgtggtatccagtattcctggcattcttcgagtctggagtacaaccagccgagcaaactactccacggttgcgattgacagacggagatcgttgcttgatttcgtgattgcggttggaatagtggagccaggtatatttgaagcggttgacgtggaatcaatggttgaagtagtagccaacacgggtccctactccggggaaatgatgggacgggagtatctactgctgtattatgcttgcagctacattccagcaaagcttgactcgatgatacagtgcgtaaatcttgatcagaaggatggcacacctggtgagatgtttcgactgttttggagccgcgttcagctggaatatcttccagtgaaatgtgtactagctccaaatactagagtgaccatcttggaccctgctcccgatctagaactacgaacgatcttcggcgttgaccttctgcggttgctgtcgtcacacgctccgactgcttcattgtggtatgttcagtctcaagggtatacccaactattggacatgatgctattgggtgcgaaggcttctgctctccaaatgcagcagccgcttgttcgttcgttcttgtccaacttgctccaattggtgaaccatctcatggagctggaaaatgccaagtatctccgcatttttgcgtccgatcctcgatacctcagatgtatcgttgatctcatttatgctccagcccatgaagttcaaacgacggccattaaactactgcagagcctggcaaagcacccgcggctttttgcgatgctctctcacctggaagacctcgtgcaacctgttgcaagtgtgaatgccgacgtgctttcctatgtggctgaaacagctctagtaaagcatcagccaacgccgccaatgcctcaagataacaatgtgcttctcgcgcaccttttgttcgtccctttcttcacgggattgagtacaacagagttggccaaactatctcttgggttcaatcggtgcaacgagtacactccaagtcggtggcatattttggtgaatgatagccgcttcagtgcaatcccggattggatgctcgaaccgaacaattccactgtggcttcgtccacttctgctatgaaacgcattcagaaacggtttgaaagttcgcttggagtgcaccgtgacaaggccaatgtctcattgtattcaatcgacaaagaaacatatacaagtcatgcttctgcagctacacggaagcgtattgcactgagactcgacaacttgctcaagatgtatacggacgatgcgaaactgtatcgagggtctgtgcgtgctcgaaatggaatcgtgatgaggttgggaagacttcttgtggaagaccgagccgaaattattcgccgagttgcatataccaagcgcgtctccgaacgtactctgttcgagcaaatgaaaacgcaacaattgtcggacctcctgttattgctggaagagtccccactatttgagggaattcagcgcgatctgctcgcgaacttggcgttctgtatgagaactccggttgaaattgtgatcgaggacacttcggacttgcaaaagctgccattgctccttgtctataacgaaagcgtcgagattgaaatgcactttccaggatctcaagaaacaatccaaggcacggtcaagcggggaggtctgcttggatatccaccttggattcaacagatatctccacatgaagacgcggaagcctgcaatggcacgatagtgcacgcgtgcgggttgcttggggctgtcatacccatagaagtactggagtctgagcttccagaagctgcttttagtttgataaacgaacgacttctcggcgcgtacggagctggagacatccagaccatctcggccttgatggggataaacactttgccagtcccgacgtcaggaaagcgccgactgcagaggtcggctgtctctctgattgttcaactcattagcgcagacgttttcattgactgtttgctcaacgacaagtgggcgattgaagttattgtggacgttgcgttgggagttctaccttgtgtggttgttctggatgctctgacggtaatcactgccattaccgggaccgaggcctacacaaagcgattctgtgcgcggctgtcgacgtcagagattgaaaccctcccagaaaacccgaacgatatcactacaagccttttgcgtcctgttatcagtatattaaatcggttcaagcttcgattgtggcaggatcatcctgcaattttagagaaattttttctcatccaaacacaccttgcgagttatcttcacgcgttttggataaacctggagttactttggccctcaagctacctgaagaattgccttgcattgctgaacgcagagtgcaaaggcaccactgaagctgttggtttgcacctgagtagtgccattccgcgccgactcgattatctggtgagatgcggatataacctcgggttacacctagcattggctcaagtgcttgcacgagcgtgcgatggaaatattgtcggcttgctcaatctttttggtgccctttgttcggatgatttgcttcgcgaagaaatttgggagcgggtattcagctcttgtggaaagcttgatggggtgctgcagcatgtggcatcagcactcgacgaatgtttcgaggcaggcgatttcgtgagccttgaagcctattgcagttttatataccttttgtgcatgagtggaataagtgaagagtgggatcgagagttttgctgttcaatggagagtcaatttgggatcttgtccaagctcattttgaagctgcgtaaggcgccagacgaaaaatcagtacgttgtttgccttttcttttaatatttggggtcatcctgcagcaaactgctcatgctgaagtatttattcctgcagattcgtgtcctcctgcgctgtattgggagtatatgcgttgacaagcctgaaaattgcaagattgcaacagctttgagaattcctcccgaggaccaaccgctaactctcgccaggacagtcaccaagtcgctgagcgagcttatggaggtcttggtcagcgacagtggagctgagttgtccgcgatcgaagcagaatttctgtgcattgatgtcatcatctctgtcggtggccaggatgaattggaaccgaaaaacgtcgtatcgactgccattcggctgatccaatttctcacttcaccgtcacaaaccttcttggccgcatcagtggctgctttacaatcagtggtcaactcgctgcttcgtggactggattgcgattaccgacactataacgacgcgctgcacgacgaaagcagcgtggccgttgttttagctggctacgaacgcgtttcgaaagaatattcagagacaaacgacagtttgaccaagatgaagctactggaaagctatgcaagacttctcgacaaattattatcgtgccgaccggttatcgagctaatgtggacaacccactttagcaacattgaaaagcaggacccgttcgttgcctggttgtatcgttggatggtgtttgaggcctcctatagtcctcccattcatgctctgaagtcaaagcgtgactctaaacgtggtcgcctactagctactgctgctagcttgaaagccagtgcgctcgcagcaatgatcaaactgagcgagcacgattcaatttccgaagttgtgaaccttcacccagggttcgtagcggcactggtctatacttttgcagagctacggaacgatacgcgtccgattgatttacctcgagcaacatcatggatgcatttcctgtgtgccgttggggagcagtggactgaagattcacgagtcaatcgctggctgacgaaccagcatgatttgggcctggttaaagcatttttgccgcaaataagcattgtcagtgttctaaaagcatgccgttcgctgggagtatcagaagacacctttaaatgcttcgcaatgcgcttccttctgctcactgtaaagcttcaatctcactttggcaatctcttggccgacgatgacgaagaatggcgcgggctctttcctttatgcatcgatacgctgaagtctcccacatcgtccgacctgacgaagtgctacgtaaccagtttgctggcagagttggcattcgatggaggccacgtaaatttattcgtgcaatcacctacggagcttgtggatcttgtcagggcagtgctggaaatgtatggtggaagactgtcaaaagacacaatccacagcatcgcatctggaatttcagacgatttcttgtcctctcgaaaatgctgtaccagcgatggcaaaacgctgtgcgatgaagctgatactaccttgcaattcgctctggttcgagagagtttgcgatttgttctcaatctctcaagggaggtggaaacacggatagtgttattcaatacggagttctttcactccatgatgtgcggaacaattttccaggaggccatttcatttttaagcgtgagggagctggtggatccatggatgagagtccaaatcgacgcacttaaactggtaaaaagtttgatgggattgggagaaggcactgcgagtgtccggtcgtatcaatttgctgctcggcgtggccaactcttaaagcattgcaccaacctcctgtcgaggtcatgctcagaagatttccggcccatgatagtggaatccttgatcccgtatgtgagccgaaacatctcagctagcagtgagattgcagcgttgcgtgagcacggagaaggagacttgatggagactctgttggccatggctacccaagagagtggggaacaagatcaagaacaagtagagttttgcttgcaattgtacaactcgattatcgagttctcaattgtcaacgcggtatatgctgctcaagctacaaacatgggaaggcttcgcaagatccgagagggattattgagccaggacgcacttgttagctcatgtctcccacgaacgctgtaccttatcgttcggatgttaggaaggccaacgccgagcatccatctaggcattgtggaggagagttgggaggtagtttcagagctgctgcttcatccgcgctgtacttctcactcagattctgtgaagcgttcgctcgagatattgtgttgctcagcggtgatcggggaagaactacttgcaagggcggcacacgactgggaagaccggggcaagcgcgttgtgttgcgcttaactgaactggcgcacggcgacttgcctctggggaatgactcgatcgcagaactatcgacgaaagccttagcgcagatgtgtcactccgatacgctgtgtgagcgcatgatccgcgatttgaatgttggtggaatacttctgaccaacagccgcattaaattgcgtaagtacccgacccaagtgctaaacgcactccttgcgcatgagatcacgacgaatcgtacgtcacagttagcagcgcaacttgtggatcagctggacgatatgttaacatcgagtagcgaacgccgactgcagctgctggagctgttgccttcattgcttgggtcacccgcgttcgaggctttaaacgtgggtgacggtatttggagtatttttcactgcatcctggctgaggcgaactactcgaaaaacagccaagattctttagtgtcagttgttagagcattggtagccatcttggacgcttgcgacgccaacagcatgccgagtgaattgtttgtggggttgcagaactcgttgatgcaactgctcagagacctccaaatggctgccgactttgatgataccccccgaaaatgtcaacaccccacctcgatcctcgagctactcgtattcgccagtttagtcaaacttggtgactgtgaagcgattgtggagcaatacagtgtgcggttcttctcgctgttgatgaattgcagcacgtgccgccactgcagcatagaccacgaaagcaagctacttcttcaagattcgctggcgtttcacttcttggatgctgacgtacaagtggacccttctacaaccgtgatgaatttccgaccctactggcgtacattaacgagaatgttcgttagctttcacgacgcagaagcacactttgctgtagcaacgatgctgctacagatacttcagagtccatctagtcgtgacttccgccgttttgtcgctgacacgtgccaaatcaatttggtcgatgttctgtggtggcaagtctccactttcaatttggagactgaaaacagtgagcttcaagcactatggtatgctctcctggaccagttgtgctgcaatcgggaggtcgcgttagagatcatggcgaagcgtttcttggaagatttcgtcctgtatgagcaccagcaccagctagaagatgaagaaaggctctctcaatcaggagatgacaagcttcttcgtctggtctccactgtgattcgagcaaccaccacttccgaccacagccatttcttcgagaaaaactatgcgacgtctgaggtcttagcagagctgtgtattcgcgctgtagtctccatctcggacatgaacaactcaaagtggaatgccacggaagttctacacgctctggtcctgcacgaacgaactcttgtcgctgtccaaaaagtgtgttgcgtctgcccgacggagcaattcgactacgattcgataacacgcccaactcggctacgcgcagtatcggagatgcttctgcagtgtgaaagtgacatcgctgacctcgtctgcgtgcttaccttggtgcttcaagtctgcggatcgcagcagagcatctcactgcttgttcatgctcggaacgcacccgactgctggcctatgaccgatgttctgatcgaagtgatgcaccaatgcattggaactcttgctgcggcagaccgagcactccgatccatagtgctgacgacttccggtcctgctgacttcctgccgtaccagctgccgacagagctgcacacgaaggcaacagtgttagcattgcgccttgtccatctatgcgttggcgatcgctatctagcccaatccttggaagcagacatggagttagcaccgcagcttgtggcatgcctagcatcggccacctgggaagttgcgggtgctgtggcttcagcgttgagcactttaattcgctgcgctccggcttggaatgacttaaacgatgaagaggttgcgggtgtaaaacgatacgagtgtgaccaagggctctaccgacggctcgagtatttctcaaccatcgatacgcaggcaacgttccgcttgtcacctccaagtatgttcccaccttgcttcgtgctcctgatccgctggttgcggtattattcagtaaacttatcgttgctcaatggcttcgaatcggttgaattagcgacgccttcgagtgccttgcacgtgaacttagtgacagatatattggagatattgttgtacattgtctccaacttccactcggaaatttacaagaacgataatggagaggcggaggagagcgagcacgccttactgcttcagtcgctattggcgctatgccagcggcgatctcagcgtgaacctggtggaagagtgagcggcgatgggaccgacacgtgcatcgtttcgagcagtcagatccgcagtcggtctcttgatttggtgcagcttttgtgctccttggatctaccgcgcacatcgtccgttgaggtctttgctaacgcccggcagatgctgattttgatgctgatcgttgagcgctcgacttccgagatcgagcagagtgcggcggcccagttgatccaagagctcgcgctgaaggacgcgatcaaggatttgttgatacgcagcacgtcgctgctttctcgcttgggtgcgtggctggaaatggagacgctgcaacttcttgcagcagcaatctgccagaagttagccactccgtctagcaagggttcttctcgctctgtacgacaaagcgtctttgacttctcctcaagcgtccagcagcaacttgctcacttccttttcgccggaatgccgggacaaatgcaaattgaaactcggcgatcagttggtcaattacatgcgccattgctgaaagatgtccgcaggatcagcgttgtcgtcacgcaacgagaaagaaatggttgggccaattcttcagtagatcgcttgcaatttgacgttttaagtcaaagtggactttgtgttcgacaattcgagtacgatacgggctttcacagctgtcatgaattcctcgtcgaggcgccagccagcactattcgatgcactgtcggcttttgtaacccagcgcagggcggcgacagtactgaaaacacgttcgagcttgctggtgggtttggctcgtccgtccatttctgtggtatcacaacagtgcgagtttcggagactccggtacatggtaatactaacgcgcagtctccgtcgacgcgaggcgttctgtcacgattgttgagacaggaaaccggtgcgataagtttcgagctgtttggagcactatcgagtattgtgaccgaattctgtaaggacttttcgattttctgcgatccggtaattgccctcccggagcagattttgcttgttctcgctacgtcggcgagcttctcatccgatgggaaaatggacgttgcgtgctttgaagcgttgagcgggtggtttccgagtaaaccaacagtaagcagcttgaaatcgagtgtttccccaatcttgcggctgatccagaacctgcgtcaactcgcttgtataaccgacgacgttgtcggcgccaagcaacttatctccgaggacagctataatccggcgtcaacatttctcgagacatttgtcgagttcattgcatctgtggaagctgcggagttttccgcgcattgcttgaacatcttgttcatggagaattccgacttgctcctgtatctctgcgcccagttcaagccacagcaaagcccccagtccacatttcttgcgttggtagccatcgcgatccgcagagaggtcatacattgccaagcgttcacgacacagtgtgctcagaagctgcttcgatctgtgattgatgctggcatccgacaaagcgttgggcagtccgagcaagaactttgtgagctgctacgcttcgcagcttctgttgttgtacgattagctcgctgtaccgggatcggagcggatagtctgggtttcttctctcgtgtagcgtatgaaatatttgcacggcggcagtgggtcgactgctttccttccaaagcggctaaggatttggtcgtagcttgtggatttttctgcgatggactgctcaagtcggtagcggtggacgcggacacacgcgagagcgagcagctcgacacattgttcactacgtttgacgcgttcgaagatggcctaacgatcgtcgagacgctgctgatgttcctgggaaagccttcaccaagcgatcaaacctccaatattgcgttcgacagcattgatcgcttggcgtcgagcattctcgcttctctggtcgagaaagtccctttccgggcaaagtttgagcaggcatcgctaaaattgctggaccgtcgatcgaagcaattcgaagagcagtcccttgttggcttaaggaaatgcatcggactcactcgctacgactttcagagcgaactacacgccgtccggctcacgtactactcgtgtattcgagccggcgtccggactgggatcatccctccgcagtgcagcggcgtcttcgagcgctttgaccaggaacaccttctgccaactgaaggcgcgtcactgtcgtggcacctcgatcaagttgattcaatccaccgtcgccattcccatatatggcgtactactagcagtgacgagaacccagtgatcacctcgtccagcaagaacttggcagcggaagacgcgagacttgagtcggagctccgtgagttgattctgtacgcgaacgagcacgccgagctgctgtctgttctaacggtaaaccgtaagaaagccatgacttttgcgataagagcagcgacgcggaacgcgcgcgtgctcatggcgttccacgcgatgaccagcatcgccctcgatttttaccttgacacagccaagaagctccaaggaactaaacgcaagactgtcactcttgataatgcgcaccaaaccacattcctcgagtggttattgctcctggaggagctggcggggctgctgtgtgcgggtcttcacgagctggatgcaagttactacgtggaaatcgcgcgtcagttccgctctctaatccttgacttgcctgtattcctccgcaagattcagcgcttggggacgcattcgcgacagcaggcgctcatgctgttcctcgacaaccttcatcgactgctcaaacgcgcgacgaatcggaacgaattgcgcgtggttgcagccaacggatcgggcatcgtggaccaaacgaagggaatccgagcgcgtctccgcaatctcgatgttgcaatatccacctcgctgggaatactcttagagtctccacacggaatggagaagctttccagagctctcgtggcgatgcagtacatgtggcgacggataatggggactacggcgctggagaaggcgatgaccagctcgaaggaatctattagcctgatgaagaaaatcacggagaagttggtcaagtttattcggatactgcagcgtccgatgagagcctttaaggctggtgttggcactcagcgacagagtcactcgactaaggaggactttgagagcccgtccgctgagctagatacaccgcaatcggttgactcaatgaacacggaccaatctcagagcagcggtggatacgaagttgttgcgttagctggcaggaatcccgatcttctgctgtctcgcttcccgttcacgtcgtcggagcttcttttggaccatatcggatgcgagtgcattgctgccaagcgggcgaagcatcttctacagtcccccaagcacgcgagcgctacagctgaggtgctcagatcggcattcggcgccgataacgatgcagtcgagcggatgtcgctcctcgagctggccgagcactttcatcggctggagggggcgaggaaactattcgacgtggtcgatcgactccgacagcaaacgctagaggatgatgacttgccgttctcgagtgtccctttcgtagcgcatgacaagatggaaatgagtttgtggcggttgatggtgcggccgattcagcgactgagactcttccacctgcaccagcaggtgcagcgcttcgttgtgagcgactacagcaaacgccaagtcattctgaacaaataccggcttggctcacctcaacgaccatctatgacacgagatcaagtcgacaaccgaagcaaaaacgttcccaagctggagacaaagtctcaggaatcttccgcttgggccagactctgtgtaaaaccgtttcagaatggtacacagcgcgttgttgctgatcgaccgatgataagcttgccaaaacccttggctcctcccgctccagtggacggaccatcaacattatcgccattgttacccaaagtggccatttccgagtcgattctaaaggtttgcgatgggattgtgaatcctgacccgttctcggataacgcggccatgatccaacttcgtaggaagctcgacgctcagaggcggagacacagcggctcacacggaccaaaattccgcaacttttggcagaccaaatcgagtcgatcggcacagtatcgaactgatggacaggatggcctcgttgagagagcgttccagtggattctctcgatcggagcgcggttgatcctgctggtcgccttctggcgccaagaagagctgcgcacggacctccaggaccccatcatggctcgtgcgtttcgcgattcccatgagcacgatgaatactacagactgtaccatgccaagaaaggtcttggggagctcgtacgggtgtggatgcccacgagcggtaggctcggactcctgctctggcaggaacggtactacgcacttggtggtacgtcccttagcatagtcatcgcgttatggcttcccagcatggtttcctctgaagcggacacttcgacccgaaacaccgtgatgacgcggatcatttacgcatacggcatcgcgatcttcctgctgtctgtggtgtcaattatgctgatcgcacggagtaagttggtggttaaatgccttccttatcatagttgtgtatttctctaacttctctattactgtagaccgctttgtactcctggagcagactcgcttgcgaattcgaccggtctctcgatattaccagaatgtcttggccgtgatctcgatcggtgtggaaatggtgcagctcaactcgctggcgtttgactcggccgtcgaatgggacgacacggaccagctaccagccgcgctgcagtggctcgggaatcaaggtatcaccaagttcggggtgtcgtcggtctcggagctgcaggctctgggtgttcttctgcttctgctgctgtggtttctgctgttgaaatgcgccaacaagttccaagaaacgagcgcgctgctgcaccgcgtgctgacgaaagatctgccagcgctcatccacgggtttctctacatggggacgatctccgtcttcttctcgtacctggcgtgtatggattgctcggaccagcgcagttccagtggcttcaagaggtgccaagtcgccgccgagtcccagccgccaccgttcctcatcgcgcaccaagacattagctgctggactgcagagcaccagtggtacgcgtttctcgggatatgggggatcaccttcttcctaccgatcgggctgctggcccatggcatgagccacgtgctgttccagcgcgagacgctcgatatcaagtacgcccccgtgctgttgctcgtggctcagttagtcaaagctggggctgccacggcgcaagcgttcttcccgtacgatccgatgcttcttgcggttcttggggttatcggtaacggagtgctgctggtgctgacgctggtcatgcagagctgctcgctctggtacatcaagtacgtcaagtgcggcatctacgcggcgtcgtgctgggcgtcgctcggcgccatccaccgcctgcactacgccggccagagcagcacgcggtcgctcaacatgatctacttcggctggctcagtatcgggctggtcacggcctcggccattctgctgcgagtgtggctccgagctgaggccaagaaccgcgacgcggaacggcatttcgcagcccagcagcgactattactcagcgcggacaactcgacaacgggtggcatcggcgcagtggagctcaagttcctcaaggcggcgaagaaacactcgcgcgacgacctcgtccgagctgcgttcattgcgaatgcgaggaagctcagcgcttcggctccgccgccagcgctgaaggaatttatggcgagagcgaggcagccgctggggagtagcaatgcggctgataacatgcgagcagcgcagttcatgcgcagtgcgcaactctccgccaagaaactggaaaacctgcgcaggcgaaggaagttggcgaggctcaccaagtgaggctggtagtgagctagtagttgagcacccaaacaaccttactttactgcacccagactgctcgttgcacaagccttcgtcgcgctccgccaagcaccacctggcacccgaggcatcctctcggccttcagatcgcagagctccggctccgtgccggtgcagccccgcgtcgcaccggaccgattgttgcacttcaagcggcacatgtgacgagcagggggatgggcacgatcttcagaaaccgccagaacatggctgcacttcacgtcagcacggaatggctggctgtccttcacgaatcgctcgctggtcatgcacgcgacgcaagccacgccaaggctaagcaagctaagtgggaaggcgtgatgccaccgccccatgttgctcgagcctgcagcagcaaggccgcagcgattctctttgaagacgcgagtccacgccccttcaacaggatttttcagaacgctccgctacaagacacgcgccaggttgacgcgtacgtttacgcgtggcccaaagcttcaagcgcaagaaggaggcgaacgcggccatgagaaagagttaatgaggtgtgtattgcattagtgttggcattttccaggccataaatattgcagttctaggtcgtaggcaaaaaaataatggcagctcgggtccctcgctgctgtttgagtgattggaggcacgggctgaagcggagcggcttggcctcgcgatgaggcggcgcgactggctcacttcttggccttgtccttcttggccgggtagtaggcgcggcggcggtaggcctcgagcgaggagctcacgggcacgacggcgcggtcctcgctgatgcgcggcaggggcttggccgacttcttcctgcgcttgtgcgcgtcgcgcgtgaagggcacgcgcttgccgctcacggtcacgcccccgtgtctctccctggtgagaaagtcggaggggatggggacgggcggcacgaaggccgccttcttgtcggattgctgctgctgctggtcgtggtggtggtggtgctcgtgcttgaagagccgtcgcagcgagaagcggtgcttcttgctgctggtctcgaccaccagcgggctctgcgtgggcgagcgcgcgtccgtgggcttggggctggcgctgctctcgccgtggcgcagcttgtgcgtccaggcgcgcgcctcgtcgtccgcgcggatctgaggcatcacgtcggcgagcgcggtgggcatgggctcgtgctgctgcttccaggggctggggctcttcacgagcagcgcggtcatgtaaaatgtatgtggggggggcgtgcgggtgcgagctccagttgtgaaatgaccacagctacgctgcacgccaacctttgctgccaagcgacatttcgaagcctcttctattggttgaagcaaatccagctgctgcgctcgcctcgttttgaaactttcagtttgaggcgctcacgatcctaaaaagctgagccaggatctggaatgtatactcggatcaaacaaagccacgaattgagttcgccatcaagctttcacttgataaactttttgcttcccgagatgcaggacttggtagtatcgcgatacgtttacacgcttcgactggggaggactgagcgtcatcaggctgagggaagtcttctcggcgacattcctctgctcgcaaaaaactgattaggacaaggctgaattgctggtaaacaggtcattgaatctttggtgcagaaggaacttgtcgagaattatcggcaacttcgccgtgacatcatcgtacaggcaaggctctcagcgaaaggtacatgtacccgcgtagcgcagagaggtcgttgccaagagcaagagcagacagaagctaccgcaagataagacgccgtgcagcgaggccacaccagtacaaaaaccaaatctgccgatgttatcggaggcggccagtccgttctcgcagcacgcaaacacgaaaaccggcccacctgcttccgcgcccgtctggacatcactttcgtgggcgtcggcacccgcggcaccgccacctgctggtggcggtgggcagcgctgcggggtgctggggatcgtcaccttcgccgcagtcatcgcccgcacagcctccgcattatttggcgtgctgtcgttgttgagtctcagctcgcccttgcttcacgcctcttccgacgctgagagctgacagcgcctcagtatgccaaatcgcgccggcaaactcgtcgtcggtcggcaatcttgaaaaggagcgtgtcaacgagcgaatctgggcgaccacaacgtggcagcggcaccagatggcccccacctggcggagccgaagaccctgctcggtgcagagcggctagcatgacaaaattcgccccgcgcatcgcttcctgcggcgcgaacgcgcgtccagccatttcggtgccacgtctgctggaagccttttaggaggggcagcgatttctaatttattctgcatttagaaatcctaaatttgggagaccgtgtcgggcgtggcgctgctggtgtatcgggccgaaagctgacccggccgccgcccatttggagcgcggagctttcaacacgtgtttggagccatttggacagccccatgttccgaccgcagcttgaagtgcgccatctcccccaccccgactcagccctcggcgggcgcgcgctcaatcctggtcttcaacttcaccttggcaccagacagtgcctggttcagtccctgttgtaagctagcgagcgctaaccattctgctatggccacgctacactgtacttggtagtgcccattacttctagacgccctcacacaatggagactcactttgaagagctttcgggaatcgggggttgagactgaaaaaactcttgagatcggagctcttcattcaccccgttacgtgcagcagatgccgctgcgctccatacgctgcgtttggggagaacacgcgtcaagctaattataagcccgccagcgtcgcgaagcagtcgcagccccctttagaaacggcggctgtacgcctgcctgcagacggcgcaaacgctggtcgccgagagcagacccgccggcaaaatttggtctccaagacggctttgctttggctgcgagcatttgagcgagattcggacagcgactctggcggtgaaagtggccctgtctgctgaagtggctggtcatcagcgacgttgcagcttagagcaggcgcattgcaagttgcaaagctggtgctgagttgctgttggcatgtgtgtcgaaatgatcgctctctaatccatgtgcaccacacaacattgatggctaagaatttcccgcgcttcttcctgtgccatacaaacgccctgtcattgatgccgcggaaggcgtcagcgtcttcgaccccggagctgggcgagccgtacgacgagcaccggtacgccgccctgcgccacgagctgtcggtgcgcggcatccgcttccgcgtcgggacggagcgcgtgacaagtagcgcgggcttcatccgcctgctgcgggactgggacaaggcccacgcagtggaggcggccgcgtcgacatcgccgtcgccttcgacgcggactcagactcaggcccgacggactcagaagccgccgcctcagcaccagaagaaggccaaggccaaggccacatccaagaagaagcagcagcagcccatggccagcagcagctccacgcgcgtgatccgcgcgcgccgcggctgccgcttccgcctcatcaacgcgctgctgagcccggacttcaacgggcgctggcgcgagatggcggcggccggcgggcgcctgggcgaggtgaaccagttctggctggacgtgcacgccgccttcctggcgcagaactcgatgctggacgcgctgcacttcgaggacgcgctcttcgtcaacgtcacgcccaacgtgatcctgccgcactcggccgcgcgcctgctgcagatgtgggccgagatcgtcgccatgtaccgcaacgccgtggcgcaggccaaggaggcggccgcgcacaacgacaacgtccactcgttcttcgacttctgcgccggccgcctcgacctgctctacctgcacatggccatgctgctcgagccccagctctccgagttcatcatgtcggacaagatccagacggccgacccgttcagtggcagcagggccaagggcaaggccgctgcggccgccgccgctgctgctgctgctgctgctgctgctgtggcggcggcgcccgacgcggtgccaaacaagtctgaaacggacagcaagcctgagagcaaggtcaaaggcaagggtgcgagcaagcccgaaacgtccactaagactgctgccacagccgcagcgaaaccggcggcgcgggggaaggccaaggtggtgtctgctccagaaaaacctgcagcggcccctgcccccgaaaagcccaagccaatgtctgctccggctgtcgctgctgctcctgtggcggtgcctgctcctgttgcccaagtcaaagctccgcgaggactcacacagaacccggagatggaagaggatccgacactggatgaagtcaagcccccagctccaaaggcaccgacgaagacgacgaccgctaaagcgaccaaacctgccgctaaggcgaagcagaccaagccagcagcccctcctcaaaagctggttgccctgaagaagactcaaaacgcagccggcaaggccaaggcgtcaagcggtgctacgtcagcgaaggaggcgaaacaaacagcctcgccatccaagcagaagtcgccgccaaagacgaaggctcccaccaagcctgccaaccgaaagacctctatcggtagtaaaccggcgacctcgccggcacccgtgacgggcaaacgtcaacgtgaagaagaggacagcacggccatcgtggaggtcccgagtgtgagtgacattgtccctcattcgggcaagcggatgcacacgaccacaacgatctcgaccgctctgacgacgcggcaatcggacatgatgctgcctccggacgaatgggatatcctggagagccggctgcggaaggtgaacgagaatatcgaccggtgccaccgcggactagcaggaggcgagggagcaagtgtcagcgatagttataagcagtctttggaggctgacttgcggttctactctgctatcaagcagcggctacaggagcaactactggtagtgatgcagagcggctattaagctagcacgggacgggtaacttatctgggtgcgcgtggagtaagtttgcaatgtattttgttttccatttcgcaagaggcttgcaagggtgttatcggttcagctcaccagcgtcctagtcgtgtgcagatctgcaggtaccgaaaggggaagtgccgtaagtgcggatgtcttcaggcgaggacggggtcatccatcttgcagttcacgactgcaccgctgacttactaaaaaaattcgctgtcttcaacctggagctcttgcacgacacgttccgtcgtgcatacatgtacaagcaagaacctgcaaggagcgcgggatcgatgctttctttgtcgttggacttgctagtattgggagagtcctatttcaagggcccaggcgcgaaggcgttttcgggtgcgtgctgcgataagatgaattgagttctatctatcgatggccttgcctccagccttggctgaccagaatggaagcgcgaggagctccagcttcatgttgtagctggagagcggactggggttgaccgggccgaagacgcgctcaacgtccagagtccaatccagtgactcactctcggattcctccacttcagctcaaccgcctcaacagccgcaacgcccctttcagctcgactcagcagaagcagaagcaactagcaaccagcgacagcaatcaactccccaccagcagcaactcgcacgttcagatcgttttcagcgtgggcagaggaacccgttgcgagttggcgtctccgagcacgtcaactacctacccagtcagtcactcacttcaacagcaaccatggctagctcggcgatggcaaacggtctcgaggtggcgatcgagttcctgcccggtcggttgttctacgtgccgctcaagaaggcgcctccgcgtctcccgggcacgcacttcttctccatcgacgacgagctcatgtactggaacttctacctcgacttcggcccgctcaacttgggccacacattcgtcttctccgagacactcaacaagaagctggcggctgcagccaagaccggcgaggtcgtgtacttctactcgtccacccagggccagcgtcgcgccaacgccgtgtgcatcttgggctgctgggccgtgctgtttcagaacatgagcgccgagaaggcctacgagccgttccagctcatgcgcttccctccgttccacgacgccacgccgtcggtctgcaccttcaacctgaccatcctggactgcctcaagggtctcgagcgcgccatgaacagcggctacatctccatcaagacgttcgacctgcacgagttccagcacttcgagcgcgtcgagaacggcgacctcacgtgggtctcacccaagttcatcgccttcgccggcccgcacaacgtgtaccagcgcacgccgcagggccacgtcatgctcacgcccgagcactacatcccgtacttcaagaagcggaacgtgacgcttgtggtgcgcctcaacgacaagcagtacgacgagaagaagttcctgtcggcgggcatcgaccacctcgacttgatctacccggacggcacgaacgcgcccatgcccatcttgatgaagttcattgaggcgtgcgagaagaccccgggtgccgtggccgtgcactgcaaggccggactcggccgcacgggcacgtgcatcggcgcgtacatgatgaagcaccacttgttctcggcccacgagctcatcgggtggctgcgtctgtgccgtcctggcagcgtcatcggtccgcagcagcagttcatggaggcgatcgagagcaggatgcaccagctcaacccgtcgaggacgtccagcgccaagtcggagctggttccgatcacgtcgtccaacgggccgtcgagtccgtacgacgccaagcgcggaagcggcaccatccgcagcattatggtccccggacggaacgcggcggcgggcatcgtgaccacgaaccgggtcgtctcgaacgcggccatcggcctcgacaagacgcagggcgacaagctcaacgaccagaagtacatgcgctaccggagcaccaagtccagcctcccgagtggcggcaacatgttctggtaaccttcaatcttccaacaacttcaacacaagatcaagagctgaacgggaacgagtaagtgcctagtaagagaagaacgagaagaaatgcacgcgaacctgcaataaaacgatccttatattctcctcctccaacaacgctctgtctcccctccctccgccatctcacaagagaactatgtccatccatcagacagacaagacaggctttgaagacgtttagacgtcctcgcaccacttgttctcctcgaggatccgctgctgctcctcctccgtgaactcctccgtgatgccgaaggtggcgcggatctcctcgggcgtcttgcccttgatcatgcaggccatcttggcgcacgccaggtccagcagcgacttgatgtccatgtagttggcggccaggatgagctcgaagagcagctcctggtccgccacgtccacgaagttggcgtcccactcgtccaccgactcgctcagcacgttgctcttgagcggcttctggatctcggccatgggcgcgtccttgtggtgctggcagaactccaccaccttggccagcacgtgcgccttgacgttgggcagcgggatctcctgcacctcgtcgccctgctcctgctcgtcggccacgagcgtctgcaccagctggctcatgaccgccaccttggcgtccacctcgaaggcctcgccgtccatcgacaccagcttcaccttcatgtccgcggcgggctcttgcggggccatctctctctttgtcgttacactcgacgcgggtcggttcttgccgtccaattcggaaatggattggaatttcctggcagtcagaaatgtgcacgagtaccgaggaaggttgttagatagcggttaggatgggggaataggaaaaagtatggaagtggtggtaagtggtataacaaatacggtgtagcaacctcgcttcaacctaatttctccgtaatgattcacaacgagtgatgtcgactacgcagacggatggcgcgagcttcgatggaagccaccgtcgcagagttgaaggatgttctggctgcacaacaagacagcgtgaagctgacgccgcgagaagtttttatattacggctttattttatttttttacttcatggaaggccagtggaccaaagccatcgagcggaaacctctgcaatcggccctaacgttcgtagaagaatcctcgcgcatatgctctaggatgatgacaaggactcgcttcctttgctcactgcaatcgtaccgaataagtttgtacgtaccgagccatcgcgaaacctttattaaacatctttggcggcttcaaccctgtaacatagtgtgaacttggtaggaattcgtgcacaagctcatcggtggtgagcacaacggaaggaatgctgtcgagatcagagcggtcatcccatagcgtaggtttatgtcgcgccacaccatctctatattctctttcgtagtggcgcgcttcctccccctgattgcccagacaaaaagcgcgcgcgtccgcactcgcccgtcgcgcgctctcctcgtcctcgtcctcgtcctcagctcgtccggccgccgcctcgcggactcgccacgtccttcatcatggtgcgtccaacgcctcaccaccagccaccaggcaccagccagtagtgtacccatctgacgccttgctacgtttatactgcagggagacgcgcgcatcgtgttgacgacgctcatcgacgagaagctgctgtcgcccggtacgacaggaagcgtcgctgcctctactactgcagtataccatacgtatactgactgactgaatgtgtactcgtgtgtgtgtggctgtgtgccgcccgcgcaggccccaagaagctctatgtgtcgtactaccgcaagcgcgtgtacgcggacctgctgcccgacggctccatccgcttcaaggaccaagtctacacgtcgcccgtgccctgcgcgctgcacatgaagcgcacgctgaacccctgtacgtggcgctggtgaccggctggaggggcctcgtcccgtagacacacccgtccctggtcccatagcttacttaatattctctctctcttgctgtagctctgaagacggacgcgggctggtcgtccatgtactcggccgcctcgggggagagcctcaaggacatcaaggaccgcctcaacatccgcaagcgcggcacgaacgcgcgctccgcccacaaggagaagaaggcggcgccagcgccagtgcccgctccgtcgcctaccactaaggagaggatggcccaggcggctgcagctcaggccaagcaagaggcggctccggtgcgtggccggtcactgctcagtgcttgagccagagcgatcgactgaccatattactgttattgtttgtttagaagtgcgtcatctgcagggaagaggccacggcggaggtggccaattgcagcgcgtgccacagccagacgcacttcaagtgtgtgactccgccgctgcaggcggctcctccttcgccctggttctgcgataagtgcctgactggccaagccaaccgcatcctcgagtttctccagcaaacacgtcgagtgttggtggagaggatcgcagagcagaagaaagcgaagcaggaaacagaggagaagcctgagcagacggataccagtgctgagcacgaggcgccgacggaggataagcagaacgaagctgctgatgcaccgaaggacgcgcaaaaagacgaagaaatgcctgccgtcgctgatgaggaaaaggatgaggaagttgacaaggatgcggagaccgacagcgctgaaaaacccgcagacgtagcatctactgaaaacgaggatggtgtcgacggatctaaggccacggtagaagtgtccacagaggcaaaggatgccaccccaacctccacggaagctctggaagaaaaggagatcaagcaggaggcccttgacgcgattagcactagcgtggagtccaagacctcggaggttgttgtcgtagtggacgacgaagacgattcagcggcggaaacagaagtggtcgcggccaagcctactacatcgacaagcgtacgtttgactctgccggaccactgacttactgtgtggttgattctaacttgcgcttctgttcacaggctgaagaaaagttcttggtgctgattgatagcctaattgtcgaagtttcatcgaaggcggaacgggccaacttgattgccaacagcaccggtgcgactctcgtacacttggagaaaacgcaactcgtgcaacttgtggagtatggcaagcgtgaaatcttggctgctactcgaccggaggctgaagatgatgatgataatgatgatgataatgaccaaggcgaaacggaggatgacgataacagtgttggtcgctctaacacgtcggaagtcgacgatctcattcggatctttgatttgcgccatcaaattctgtcgtcacaggcgcagtttgaacgtaccacgagcgctctcgccaagcggacggaaaagcatttacgcaacgctgaaacggagctcatggatctagagcaggcgcgcactgtggaggcttctgcaatcatgaaggtggtggatttgatcaaccagtactcaagcgacttgaacaagtgtgaacagaagattcatttcgacgagatgcttctggagagtatcagccaccggcggaactttatccgctccacgaacattgttgaccgcttcgtaccggcctatcgttacagctcgaagcttatgactaccagcagtgaccagcttctattgactgttctgctggataagctccgcgacatcacaggttctgtcaacgagtggacgaagatggaaaaccacttcgaaaagatgacgtcgagtctgaagaagtcgctggctctgattggtacgaagcgaaagcgtacgggtgtttctgtgaagttaccgccgaccccggcattgtttgctaaggtgaagattccgccgtcccgacgtctcattgaacgccaaatcgcaaattaccaggtgaatcttaatgtgattcgtcagaaccgctcccgtatgcggaagacgctgtcgggtattctgaagatcgcccgggaggagcatttgagcgaagaaattgtcaacatgacagacatgttgtatcaaaagtgccgtgatttgaaagctgaagaggaagagaagcagctgaagctcaaggaagaggcagctgaagctgaagccaaggcgaagaaagacgacgatgaagatcatgacgagaacactgatggtggtgaagcgagtgcagaggagccggaagcgaagaagccgcgtttggccggagcgagttctgcgtctgacaataagcccggcgtggctgctaccgccaatccttcatcagcaagcaaggcgcccacatctcatgaagcgaaaggcatctcatcgctgctaggaagtgaggactcggatgccaaagagtccaactacagctccgctgagagcaagtcgcgcgcagataacgacgatgacagcgaaggagatctggagcaagcatctcgcgcaattgctgacattacctcgtcagtattgcccgacatctcggcaggaggtgatccactgcttaactcaccgcccatgacggcgaagcctgcagcagagtcatcgcaggaactggcgccgcagggcgtgttttcgattcgtgggggaaagggagcagacaagaaggaatcggccccgaaggaggctgagcagcaaaaaggccaggcgcccaagagtgccggtcaaagcgagcagtcatttcttgaccaagcgctcgaagttctgaacaagcagcagcaacagcaacaacgtcttgagcagcagcgtcttgaacaacagcgtcagttggagcagcagcagaagcagttggaagaacagcagcagcagctggagaagcaaaggcgacttgagcagcagcgtcagctagagcaacagcgtctggaacagcaacgtcaggagcgtgaacgccaggaacgagagcgtcaagaccgagagcgtcgagagcgggagcgcctggagaagcagcagcgacttgaacgacagcgtatagagaagcaacgccaggaacaagaacgccgcgagcagcaacgacgtgagcagcaacgactagaacaggagcgtcgtgaacaacagcgtattgaacaacaacgcattgaggaacagcgccgcatggaagagcagcgccgcattgaagaggagcagcgtcgtttggaggagcagcgtcgtctggagcagcagcggcttgaacaacaacggcttgagcaacaacgacttgagcagcagcgtctggagaaacaacgccaagagcagcaacggttagagcagcagcggctggagcagcaacgcctggagcagcagcgtctggaaaaacagcgccaggaacagcagcgccaagagcagcagcgacgacagcaggaacagcaacgactagagcttcagcgtcggcagcaagagcagcaacgccaagagcagcagcgccaagagcaacagcgccagttccagcgcaacaaggtgcccaacctccctcaggtcgtgcagccgggatcatcccacctacagatgctaaaccagcaacagcaacaactccagcaacagcaggcagcgcttcaacagcagcagcactcgcgtcaaatgcagcaccctctgtacggcgacatccccaagggaatgctcatgtcttctggaatgggctcaaatcagcaggatatctacgcgcagcaggccgcccaaatgggcatggacatgcacgacgtcgtgcggcaccaggactcgggccactttgttggcaatgcgtcgggtggtctgcgcggggctccctacgaagtctcgcgcagcgagcccgcgccgacagcgccgcggacgagtttctatggcgacgacggctctcaagacgtgtttggctcccagggcttgcccggtcagcagcggcagctctccgaacatcacatgttcaatgacttgcagcagcagcaacaacaaccagggcagccgcagtcccgaggaatggtgagccaggactttttgatgggccgtgggtcatacaggcaccccggcatggaccaacctgacgacaacgatgtgaatatgggcgactgggggcagtgagctaagctgcagtagacgggagcgccacgagcattgcccggaattgattgacatacatgtaagaagatttgttgtcgttgcagactttgtgtgcttgacgtgcattcgtctggacttcagtgaggtcacctcacaggcttgacgacttccaagtgccatccccccacggtatatgaaatgacgatgcacgtctatttgatactaatcgcagcaacgctcgggcatgaggcgctgcataaattataaacgatttactaggaaggccgagcgctgtagagcccccgtcttcatgagcaacgcagcggacttgccgcatgcgctgcgtgagtggtggttaaccgagttgaaaatgcatgcagctccacctgctgcgccttagaccgacacggaccgggccagcacagcgagacgctgctgcaagtgcgcctcgagccgatgctgggagtccagggcgtgagcctggtcctgctcgacggtgcgtttccatcggtcgagcagctccagcttctcgatcacgagcttgtgcgtcatgaccatggtggtctcgcacgccggaagtctcctcacggcctcctgcgccagcgcactgcgcgggtcaaagttggtgcgggcgcgacggacgaagtcgctcacgacctgggggaacttagggaggcgcaggctttgcagatccggggcgaactgtcgatatctgcggcgagcctccggctggatgccgatggccgcggcctccatgagctggccagcctcgactgtgagcgcgaacgggccgttggcgaactccctcgcggatcccgagtactgagaggagacgacggtggccatcgccatacgcagcagctgcagcgcctggtggtacaggccgatggcccggtcgatctgtttcttaatggactcgcaggcctgcgcctccgaggcgtacatggccacgttggtgtgcatctgcagggcgtcggggagccggagcgttcggagcagaaggcccagcagcctctgcttctccctctcgagctgctcgaggcgctcagccacatccaggtcctcctcttcgtcgaagtagagctcgtcctcgtcgtcattgttgtcttcacgacgctcgctctgctccacgacgtcgtcctcgccctcgggctgagcggagaagctgcggctgcccctggagctcatagagaaggaggagcggcgcttccactcgtccacgagggagctggaccgccgctcgagccgctgcagctcggcgtcgacccgcacggcgtcggccatgtggtggccgagcttcttcttgagctcctcggtcttcctcttctggtgggcggccgagcccgtggccatggccaggtacttcttgagcacgccgcggtcctgctgggcctcgagctgctggatcatgtgcttctggtcctcgcggatgcgcagcgagcggcggcgcgcgcggcccagctccgtctgcacggcggcgagctccgggtgcggcgcggcgccctgctcgccggccgcggacgagagcgcgtccatgttctggatgcgcgtaaggcgcgcgacctcggcgctgacctcctcgaagcggtggaacagcccgcggtccacggcccgctgcatccacgggctgtccttgcccagcagctgctcgccggcggtgggcaggctctgcgtgcgcgcgcgcgtgctcttggccgcgcgcgcggacggcgccgggttcacgctggcggccgcgggccgcgggggcagcccgagcgacgacgggtggccggccgtggccggcggggggctgggcggcgccttggcggcggcggcagccgcgcagcaagccgagtcttgcggctgcggggacagcatcaggctgggcggcatcgtgcgtgtgcgtgcgtgcgtgtcttgagctggccgagggagctccgggcggcgacggcgcaggcttgagcttgagctcggcgcggccaatgcgaaactagctcacccctcggccggccaggggggattccctgcagtttagtgcgacactcactctcggttcgtttcaggccgggttcctttgcgccagccaatcacggcgcgcggatgggcgaaacgagcagacgtggtcatttcccttgcagagccgggccagtcgggccgagctcagagtccgcgacgtccacctgaattttatgcttgaaaaaagctctgccggcgctggctgactaccgtgtcagcaacgtgggcggaccgaggcgcgtgcgtggcggcagtagtggcctgcatggagctcgccgcctatcgcctcaggcagttcgtggcgtcgccaccgcattaaacttttcgccgcggccgctcgactttctcagctgaccaacgtttcaaggggccgagttgaagtggtgccatcggagaccaggccggcgctgctgcagcggagcccgatgggctgcactggcactgccagggccgggatcgcgagcgaggctgggcctccaaacatctgattacggacggtccccgcgctgcccgatagcatcctcctagctcgcctacgacagcggtcatgagcaggtcgagcgcgagctgaccgccgcagtgactctgcattattgtcagcgactgatgcactccgagcggcggcaacgatgtcttgaccgagcagtgaaccgctcttgcacgtcaggggcgtgtcggcggcgtcacgcggacaccagccggccgcgttaccacagcgccaatatggcgcgctcgccagcaggctccgagccgcgttgttgccgcccgccgttatgtgcgttgccttcgttcgtgctcagcgagctacaaacacggcagctgccgcgatgcgtgtcaatggcgagcgtctgctggctagatccaccggagccgtgttgtgcagtcggtggcaaatgccgcttcgtgagcacgggcccatcctggactaagaagatcggcaacggagatgcagtgcagtgttctcgaccgagatgcatctcctgatgtgcagcgccgtgtcgcgcgtggcgccgccaagcccaccctcactcgccgtcgcctggtgccaggcgtgcatattgcagctgcgccctcgccttcgccttcgttgaggaagcagtcgccagaaacgacagtgaagccgcccggccgttgcagctgggttgatcgggcctgcaggagggcgtcgtgagtgcgcgtcaacgtcgtagtcctgtgtttgccccacagcagtaccagtgcgtacaggcaatggaccattgcccgacgcacgggtggtgccacaagagctggaccaatcgagaccagaggcgacagcggcaccaccggaatcgccctcgcgtaattaatcacttcctgacttcggagctggagggggggtttgtggatgcacatgtacatgacaggctcgggggctgcttaatcaaatgttgacagcgggcaatgacaccttcgctacggacgcgaggatgcaaaatcggcgcgggttgacttctggtccttgctgatgtaagaatattgtccggaccaggcgttaaactcttgggtggacatatttcgagacacttttggccatgatagctgcggtcttcgtcattactgaggctattcccgtagagaactcgaacgcgcctttgttgatggcgggaaagcttcgatcacgtgctcgcagctaagctattctggagtggcgttgacacttcaacgaccacgcgacggtcgcggcgaccgcccgagagaaagggtctctcgaagtccaccgcatgtccaccgaagaaaggtgtgcgtgttctcttgagatctggcggcggcaattcgccagccacgttctcctcgtgcccatgctatcgacaacgcgagcgtcgccgctcggagccacacgctccgtagagtcgaggctgagcgataccgtaactcgctctgtaatccacttcgccaacgtggtgtggcgcgcagttaatctaggccgacggcaccttcactcgcgccggcgccggcagacccatgtcctgccggcgctgagtcacgcgcgcgccgtagtccgcccatgtccgatctccgcgatcacaagccccaagggtaaactctgccttcatgcaccgaaagtgaccagcacggaagctgacttggccctagtatggacccctaaacgtaggaccctacgtgtcctaaactagggctctgccttcacacctatccgctcgtttactttcattcgctaaaacgctccgactgtcgcacaccgactaaagcacagcaccgacactacatcatggcgatgaagctgccgacgggctacggctgcgagaccacgaacggggacgacgccagcaacggccgcagcgccagtgccgcccaggacggagaggactgcgtcaacggcgtgctgcgaccggcctcgcagcagaaccagtaccacaacctgcccgtggcggtggccgtgccggtgacgggcatccgctcgtcggccgccaccaccgccgcccagagccccgaccgcgcgcgcgcgtcgtccgcggcggggcgccggaagtcggcgcacaacttctcgttccgctcgctcacgggctccaagttcatccgcctggccgacttcgccggcaagcccatcctggtcgtgaacgtggcgtcgcactgcaactccaccaccaaggcctacgtgcagctcaacgacctggccaagcgcttcccggagctcgtgatcatcggttgcccgtgcaaccagttcggccaccaggagaacctcaacggcgaggagatctaccagagtctgcggcacatccgccccggaaagggcttcgagccggccttcatgctcacggagaaggtggaggtcaacggcgccaacgcgcacgcgctcttcaacttcctaaggatcacgctgccctacccgtgcgaccgcacgctgctggacgagatgtccacgcccagcggcgtcttctcgcaccccatgcgcctcatctggatgcccgtcacgcgcgcagacgtgagctggaacttcgaaaaggtgcgtccgcagctgtagtcttcgaactgtgttgatcttgttgctaacgttggtcttgctgcttctgctgctgcagttcctcatcagccccgatggcacgccctacaagcgctacagccccaggctggacttcacgggcatgatcgaggacatcaagttcctgtgcaaggtggacctgtcgaacgagaagcagctataagaagacgactgcttgaaggcaggcgccttgcgggggatacataaacagcgcggagcgaccatacctaccaccgaaacgctcgcagagctcatgggcggacggccgcgtgcccaacaagacacgagccaagacgaccgactggatgtgtttgtgagctcgggacgcgagcgcgtgagtagtgtagtaggcagggcaggaaaagcgacgcggaggataagtaattgcgtgagaattttgcagtcaaagccagccagcccacccaccgaaacggtcgtctgtcctgtaacggtcctctatggtcctcttccagcagccgttgtcacacatcccccttaaacccatttgattcgctaaaactcctccctcctccttttcatccaatcacgtcgatttcaaccgtggccagccaacgccgcgttttactggttgccatcacttgcagcttgagccgcatcaccagcagcaacagtccagccccgccgcgcagctcgtagctcccctccgactctagcaagccaagccaagccaagccaagccaagcaaggccaagatgcagcacgacgaagtgatctggggcgtcatctcgaagcagttctgctccttcaagagcaagctgccgggcacgggcaacatgttctgcagcaacccgtacaacgtgacgggcctgtgcaaccgcacggcgtgcccgctggccaactcgcgctacgccacgatccgcgaggaggacggcgtgtgctacctgtacatgaagacgatcgagcgcgcgcacacgcccaaccggctctgggagcgcgtcaagctgagcaagaactacaccaagtcgctggcgcagatcgacgagcagctgcagttctggcccaagaagctcatccacaagaacaagcagcggctcaccaagatccaccagtacctcatgcgcatgcgcaagctcacactcaagaccaagcccaagctcgtggtcatcaacaagaagatcgagcgccgcgagaagcgccgcgagaagaaggccatggtggccgccaagctcgacaactcgatcgagaaggagctgctcgagcgcctgcagaagggcacgtacggcgatatttataatttccccgagcgcgagttctccaaggtgctcgagagccagggcaagcgccagaccatggaggaggagagcgaggacgaggaggaggtcgagtacgagctcgacgaagaggaggaggacgacgacgaagacgccggccaggtcgagtacgtcgaggactttaacgaggacgagagcgacctcgaggacctcgcggacgagttcgccgtggacgacgacggagagagcagcgacgagtccgacagcgacgacgagcccaagtccaagaagcgcaaggccgcgccgcccagctccaagaagagcaagaagcagaagaagcccaagggcccgtacgtcgagatcgagtacgaacaggagcaggaggcggccggaggcgaactcaactggtaggctattgctgctgcgttgtttgctgtctggatgggtcgttcacctcggataaaatcgaaatagactattttgcacgtgaactctggactgcgttggcttgccttgctatctgaatcatgacgttgaagtgaagtgaactacctaactgtactgccccagcggaatacgaacaactaatccattccattaattacaccaccaaagctatcatacctacctactgctgcgagcactctggccgttcgggctcttcttgactatgcgcagctatggcgtccaactcggtcgttgagagcaagaagccaccggctcgagtactacctgcgtcctcctgaggttgagaggaggcttcgttgcaagtgtcatcgccgtctgagaccacgtgcgcgctagactcgtggtgatggtcggcgtcgctgtcctccccgagtgccttcgctgctgccgctgcagaggcatcgtaggtgcccgtatcgcccatgagctcgtccttctccggcggccccgacaacgccgactccaactgcttcttgagctcccggttctccacgtgaaggtcgaggttctccttctccagatacgagacgttctcgctcttctgctcccggagcttcaccatggcgtcctgcacagacgccacctgcgcctccagcctctccaccaactccatcttctccttcaccagcgcttgcatctcgtggatctcgtgctccgccttctcgcgctcgtcgcccagggccgcgcgcatctccgccttcatgtctgctgctcgctccgtctcggctcgcagagcaccgcggagctcctcgacgtgctccttgagcagcttcagttcctcgtccttgttctccactagccgctgctgcttctcctggcgactctcttgggactgcgccaacgcttgctcagcctgaaccaagtccttctgcagctgctgcaccttggtctgcaagtcctgtcggtccttctttagcttccggaacagatccagcgtctcggtcgtcatcttcaccttctccagcttgtcaatgcgagccttctgcttctccacgagctgctccatgctctcctgggctagctgagcctgcaccagttggttgtggtactcgacggcctccacttgggaagacttcagcgactccgcgaggctctcgtactcctttcgatacttccccacgtcattctcagtcatctccaactgagtctccgtctccttcagcttcccttggtaagcagcttgctgtgcctgtgcagttgcgcacttctgggagagctcttggatctcgttccggagctgctcctcgacgtcgccacgctgggactccagagcggcatacttctcctccagcagtcgacgttcatcgtccagctcctcgcacttggcttgcagcgccttctgttggttcctgacctgaacttgccactcctcctgctcaccagcttggctctcgagttcctcttccttcgctttggcggcgcgcttgagctctttgacttcagcattggtctcctcaatcaccgagcggagccggtgaatctcaccatccgcgttcttctggtactcctcgagctcgttctgcgcttcctggaactgctcgcgcatactttccatttgaagcaccagttcctgctgcctctcttcccatgcagcattcgccgcctccagctcctgttgaaccgcttctttttgctctgagagctctgcatacgattgtttcgccttctgtagctcgtcagcgtgggcctccatctcctgcttcgaagcttcagcgctggtgtggagcgaggttatctcctcgtgaagacgcttctgttgtgccagcaagcgcgcgaactccctctccgccatcgcttgcttcttgttccagctttcatcctgctggcgcagctcttcccgagcctcagtcagctcgttctccagtgttgttaccttagcttggagttcgatctgcttctccctggactcgacaagttccatcgcatcgcttggcatgctcacgccattcgcgctcatcatcagctgctgctgaagcgcagagatcttttcctcgagcgccatctctttgccttcagcagccacaaggcgctgcttactttgcagacgcatctcctgctgctcctcgtttgatcttgccagggcatccgccaaactcgctagctccttgtccttggcttcttgcgtgcgagctgccgagtccaggtctgtttccagcgtctttatcttctccaacaagtccgcgatcgtatccgagctatcctttgcctccttgcgcagcaccgacagggtttctttgtacgactgcacatcaagctcaagcttctcgcgttgcttggattcgctctcgaggcgttgttgaagctgctccaactccggggcattgctatccctaccaggattaagggctgtatcgcgatgttgcagctcatccacgatcgcagcgtggtcggcctgcaaagctgtcaaagcaatttgaatgctttcaacgttcttctcaagctcgtccttgctggcttcgagggccgcctttgcagactggacctcttcaagctgcgcctgcaatgtagcaatagtctccgaagaagacgaggctacctgctgcacctcccgcagcttgatctcctgttcatcggctgacatcgcgagtttcatcttctcttcggacacttccatcagttgggcttccaaagcccgcagctcctccacgcaatcatcgcgctcacgtgacaccttttccagatcgtccgctagccgcttaaagtcctcgttcagcgcgtcaaagcgttgctgtgagtcgtcctcagatggaggagacgagctagcgtcttgcttctgctcctccaacgccatgagccgagcctcgcgttcctgcatcaagttgtcgaaatcagcctgaagcttgtcgaaggcagcctggagatcgccttggtcgggagattcctcgaacgccttcaaacgctcgttcgccgctgcaagttcagactcgacggcagaaagcttttcagtcagctgttctacctccgatcgcaggccttgggcctccatctccttagcttcctttccgctcgaatctgtattagtgctggcatcttcaacctcagcctcagtggtagttgtcgaagtgctttctgaagcagtcagctcttcgattatagcctggagctgctccctctcagtcgtgagctcttggatggtctgttgcagtgcttcaacctcgccgctttgctttgtctgcatctgtgaaatcgtcataagcttcgcatcgagctgtgcctgtaggaccttggcaacatgctccttctgcatcagcgtctcgctcagttcatacccttgacgttgcgaagcttccagctcctcgctcactctctcggattccgcctgcagctcctgcttctccagtgccgttctctcgtgatcggcctgcaactgcgccagctcctgcatgatgttctgcagctctcctgccagttcttccactatcgcattatcgttttgtttgtccacacctgggctttcggatgctgaggcaacctgccgctccagctcgctaatcttctgctgcaacagggtcttctcctcctccaagtcctccacgcgcgaatcctgctccgacgggttggtatcactttgctgcgactttaacgaagcgatttcatcgtcgcgctccgctaccgccagctgaagcacagtctgtgacgccttcatttcttccagcatgccttccaactcattccttctgctgcgcattgccaaatattcttcattgtcatcggacgtcgtcacccccgactgaacagactccaacacagcttgaagctcacccttttcgctatcaaaccgttgctgggattccttcgcctcgagcttcaagatctgcagctgacaacgaagcgaatccagctcttctgcggccatttgctgcgagtaaatcgtctgcatctccagatcctggtagcgctgtttctccttcgctaatgcctcctgcgaggaactcatctcccccatcatctcttcaacgagagcactggctttcgaggcgttttccgagcaatcacactccaaatttccctcactcagcttcgttcgcagctccttcaactcctgctccagcaccaacttctcgtccaagacagttcttgattgcatgttcgccaccatcagagctcgaatatccgctagcacgtcaaacgtgcgagcgcgctcagcgtcacccagcgacgcgctcttctcgttcgcaatcgcttcgatcgccgcgacggggtcctccacattttcgtcgcgaaagttccgaagcacggctgagaacagatccagcacctccttgctgccgtccaaggatttaacgctctggccggcttggttcggcttgaatttgctcgtagcagactccgatgccgggttttcaccgtcttcgtcggcatcttcgtagacgcggaaaagcgtttgggggtccagattctccttcgccggagagcggcgtttgcgcggataccggtgtggggagagcggggcgcgcgccttgatgctggcggggaaatctcccggcccccacgtctctctcgtgcgcttgccgcgctgcgcgcgcttcttgtccacggcggccttggccactgaggtgctggagaggatgagtcccttgagccgcgccatctccgtcttgttgtggttcttctcgctcagcagcgcctcgttctctgccttgagcgcgttgagcgcctccgagttgacgagcttcttgagctcgttgacctcgcgcttgagccggcgcagctgcgtctggtcgtccagcacctcattcacggtggccgacgtcttgatgtccttggcgcgcgccgcgaactgcagcgtgctcttggtctcctcaatgtaccggtcgctcggcgtcacgcagcagatgatgagcgtgcgcgtgttgccgcccagcgagttctgcagcaggcgcgtgagcttgctgtcccggaagggcgcgttctggccgctgccgccggcgctggccagcgagttgatgacgcgcgccagcgtgagcagcgacttgttgatgttgccggcctcgcgctggcggataccttcgttgcccgtgtggcgcaggctctcggagccggccaggtccacgaggttgaggctggccacgagcacggcgccgttgacgtcctcctcggacaggcgccggccgggcgcgtcgctcttgtgcttgctctcgaccacgatgcggaagacgctgtgcgagcgcgagctcttgtcgttcatggccgtgtggcccaccgtgcggttgcggttgcccgtctgcagcagcgtcacgatgtcctcgtagttggtgatgatctcctcgtggcactcgacgtacacgcccttgcgcgggtcctcgcgcagcttgaggttgtcgctgggcccgagcaggtcgcgcacgacctcattgtagatctcgaggaacgacacgcgcagcaggaagtcccggtccgcgcagctctcgatgaagccgaagatgtcctcgaccgccagctgcaggatgcccggccgcgtgctctcggcctcgggctcgaacggcatgccgccgtcgccctgcatggtgaacgtcttgcccgagctcgtctgcccgtacgcgaagatggtgccgttgatgccgcccagcgtcgagcgcacgatgcgccgcgccacgcgcgcgtagatgtcgcgcgcgtcgctgccggcctcgaagatgtggtcgtactggaacgtgttgcccttgccggccagcggcgcgcccgtcgccgggtccgtcagcgccacggcgttcagcgccggcacgcagctcagcgccggcgcgtcctgcgcgcgcgtctcgcgctcgttcatggggcgcacgcggatgcacacggcgatgttctccgcctcggcgggcgccgacacggcgccggcagcgaccgtcatgccgtccgtcatgcctgcctgcctgccttccgacgtggagggtttgaaactggacgcgggtgagttttgagttttggcgcgcttttcgggtgactaggtttcagtatgctacttgaaagtacagaaacaggcgcagttttagcactggcatgtgcatgtgtgtaccggcatcctccgttctttactgacagtcatgtttggctacaaaaagtgggtaaaaaagtgatgtctgccgcgcattgtgaaacacacaaaaagctcattgtttcatcgcagaccgagctgctctcgatggtatcatgctcgacagccacagctcaaattctatgatctatcagactcaggctagaaagctgagcgataatttcactagctacgtctactttcttcactaaaggctgtgacatacatgtagtcatcgcctgcttccagggcctgtaagtgcaacatcaaagccgaatggtggtacgccctccccacgcagttcattcatccataccacgagctcctgctcagcttcagcggggagggccatacctgtgccgctcgtccgagcattctttttgagagctgtctgtccatgagctttcgccgcggttcgtggacaaaatcatctagaccgctgtagaaggcgttaaaagccgcggtgatgtcaccgcactgtgcccaggcatcgagcacctcgagctttctgctgccgtaattgcggtgcgtctgcgagcaggtagcatcttgtggattgggaaatgacccatttttgtgttgtcagttaaaagtggaggatgacaataaggtattttgattggctataattgattgtcagtaataagcgaacgtcagtaatgccggtattgatgagagttggcacaactggaccggcctatacaaaactacgagacagactaagctcacttacatatagggtctacatctacagtaggtcttttccactcgtggacttgattcacatgcgcagcttgcggccgccaccgctgaccaaagctgcggccttctgggccgcggtggtcacactgccgtccgtcgtgtaggtcatgtgcgccatggtgttgaagccgttgccgcagaccgggtcgccctgggcgcagaactcgatggccttggggccgtacgtggggctggagctctcgatcgtctggcccatgagcttcagcgggttgccgaacgtcacgacggccttgatgcggggcgccaagttttccgggatggtgtcaccggatccgagcgacgtcttgatgccgatggcgatgtccgtgacgctggctccctgggagtagccaccgagcacgaaaaccgtgttggggcactcctgagcgacggacacgacgtggttggtcatgtcggtggcgccgggtccagcgctgctctggtccatcgaagccatgtagttgacagcgtaggacgagacgcttttgccgccgaggttggaggtgatgccactgaccagcggctcaccacagatgccgagtccttgcatctcaccactaccgcgggcgaagacgacgtggacgtcggagcactccgcgctgacgaggttgatggggttggcaaatagcaagatggacccgaggacggcggagaacggagtggcgaacttcatttttgtaaggggatacttcaagttgcttcgggtgtttctggtcgagcgaaaaaccaacaatgaacatgctcgtcggctgaatattaagatggaaaagcgatgccgacacgccttgactcctctgcgtattgctagtcgtatcatactgtagatacagttgaaaggctagatgtacgccaatctgctggtgggctaacgtataagccaagcgtgtggctcccgtcagaggcagccattacgccctctctgtgcatacgtatgtagttgggattacaggatggacgaatgccaagctgaggcggtctgtaagcgaagaagggcacgcaacatggctagaagctcatatcggtggctctttcctggcagctgtgtgtctgctgctaccgttcggtgcctccaaacagcaaaaacgaaggtgcttagtactaactgaatatgcttacagcaaaacctgtgctgccactactggtacttaactaatgaagttcctgttcgtatcatcaccacgacgcagggtctgtgcagctggtgccgcatcgctaccaagtagggataatacttgcggtccaccacacggatgaataacagagcaggactcggatgcacactcgatcgttctccccggcacggcgatgccgccgtgctaccaggagagcagcatttacactaagcttcgagatggtacaaatcgtacgtaaataccaatgggttcctggattgattcctgttgagctggtgttggtcgagttggcgttggtgcccaaccatagaaaaagatgaatgtgtacaattgccagccgacccgccttatggtcgctggtcaacacttggctgagcatatccactgattgtcgtcgactttttcgtactttacgttcgtttaaggcttgactcacttcaacacccgaagcaaatctacagcagacgtccgataagatcgccccgattgcgggcagcacatgcgccgcatagcgtccgcatatatccgatagagttttcagtagaggattgacaccttcatgacagctacctacctaatacgcaggggatatatatctgttggccgccgccaaagtacacagcacagcgattcttcattccaaattctgacccgttcaacgcacccctctgcaatatccaacgaccatgaagtttgcttcagcctgctccacactgctcggatcccttgtcgtcttggtcgcgaatccagccaacctcgtcagcgcagagtgctccgacgtccacgtcgtcttcgcccgcggcagtggtgagatgcaaggactcggcatctgtggtgagccgctggtcagtggcatcacctccaacctcggcggcaaaagcgtctcgtcctacgctgtcaactacatggcttcgatggaccagagcagcgctggacccggcgccaccgacatgaccaaccacgtcgtgtccgtcgctcaggagtgccccaacacggttttcgtgctcggtggctactcccagggagccagcgtcacggacattgccatcggcatcaagacgatgcttgggtctggtgacaccatcccggaaaacttggcgccccgcatcaaggccgtcgtgacgttcggcaacccgctgaagctcatgggccagacgatcgagagctccagccccacgtacggccccaaggccatcgagttctgcaaccagggcgacccggtctgcggcaacggcttcaacaccatggcgcacatgacctacccgatggacagcgtgtcgggtgctgccgaaaaggcggctgcgttggttaagggcggtggccgcaagctgcgtgcctaatcgcatcgagctcgattggtgttgtgtgtttcatcgtcaagtcagcattttagtaccaatggttagtacgaatctgtcattcaatagaagtatctgtcactactcagtcgtcgtcgttcgtgcagtgatgttgctgtgttgcatgttgtcgaaaatgtgggtaagtataagtgtaacaggcagaaggccttggagctgaaccttcggcgacaataagcttttgtgtaggctttattactgctacatgtaatagtgcatgtgagcggatccatacggtgcaatacgcgactattgcacggaactcaaatccaacacatatattcaaaggtcaccatgtcgcgtacgtaactataacctggactaaccgtcagggcgtacgcggcctatgcacgcagcgctctgactccacccttcaccagcgcagcagccttttgggccgcggtggtcacactgccgtccgtcgggtacatcaggtgagccatcatgttgaagccggcggcgcacacggggtcgccctggttgcagaactcgatagccttgggtccgtacgtggagctggagctcgcgatcgtctggccgaagagcttgagcgggttgccgaacgtcacgatggcctgcgactcggggatgacgctaccagagcccagagtcgtcttgatgccgatggagatgtccgtgacgctggcgccctgcgagtagccgcccagcacgaacacggtgttggggcattcctgagccacggacacgacgtggttggtcatgtcggtggcgcccgcaccagcgctcgtctggtcgtacgcagcgagatagttgactgcgtaggacgagacgctcatgccgccgaggtcggaggtgagggtgctgacgagaggctggccagccgtgcccagtccgggcagctcgccgcttccgcgggcgaagacgacgtggacgtcagagcactcggcgttgacgaggtgggcggggttggcaagcagcacgagcatggatccgaggaaggcagcgaacttcaggttggtggtagttggcttggagttgttgcttttagtcgatcggggcgtcgcttggtgtgcgtagtgcagcggaaaacgaagaatggtaagttcatcgtcgaggaccgcggccgttgagatcccaggcgagtcggccgtgtacttctgctatctctgccggtagtgtccttttcgtggttggtcgttggtgcgcgcgggcgcatttcctgccatgcttttcaccttggtgtaggtactacgatcagaacatgcctaatgtttcgtatccgtgttgttgtagacccgctactagcgatacagtagtgtagttagtgtacagcaccatgggtatccaacaaggcagaaaccctcgtcgatggtacataacctgaaggtttgggggaaccgcctgccggttctcaccgaagagtttacgtgccgaagtcagaaggcacctacagtacagaccgtgggtgagtgagtgaggtggaagcgtgcaaagcgttggcccttgactcacggccaacgtctgggtttctgcactcacgaacggtaaaaacactgaccgtagcactcgctatccaacatgtttaacgcctcgacgagtcccgattacttggtatcttgccacaagtgtgcggatcttttcgatccccgcacaaggggcctgcctttttcatgtggtcgtaagttacgccttgtcctaagtcgtgtgcgtggccttggcactcgaggtcgagctaggccagctactgaacggctcgttcgaaacgagggaacgtctacgtgcaattgcacgtacctcccctccccgcttgccggtacaagcagccctagtctgctgtaactctactgtcttgcaaatgactcgtcggagcaccaatgttgtgactattaccttggaaaaggtgttgattttcaaaacacttgtacttggtcttcatccattgagcccatgacacacggacacaaacagccaagccaagcctcacggataataccgcgacttccccgcccgccggtcactgaacggtatcttccggtcttatcgggcttttcattgataccagctggtttctggtaaccggatgtgtgttctcgagtcatctaaccggtttttagcggtactacatcggtgtcatcatcttagaagaagtttttttcatcttagattcctgtgcgtttcttgacggcgggatagatgtgcatcacaagccgaggacggcaaccaggcagcttaggctctagaaaatttagaactttattgcaaattgccccccccccccaaaaaaaacaaacaaaaaaggagaacaaatcagtaaaagtggctgggatgtattatggtttgagcgctggttgccagaagcgatacggtttttcgaggaaagcgacactagcaaagttgcctgcagcaagcatatatagataagacacggcctagctggtgttcaagaggatgccgtcactgctgtggtacatacttcatgtacatgtatccatcatggatggtgtccatagcctcatgtatgatagtaataacgattaccttacaagtagttacctgcttgtacatcgtgtcgttcagtaggcttatcggcttgcgtcaaactgctcagctgcattagtggggggggggctttcacagcagcgcagcaatgctgcctcgaacactggtcgatgtactatctataaggaaggagaagggcgtacgcttattaatttcaagacaaagccacaaaacttgagagtggaacagcagtatatgcatgtattcaacaatcaaaaacacatcgctttgtcagcacaggctgcctgtgctcaacaatcaaaacagatacactttctggatccagtctacatacaacgcggcatcgcgtacgtcaaagcgatcgcagcgtgctagcgcttccaagggcgtttacgaacgcagcgatcgggtgccacccttcaccaacgcagcagcattctgggccgcggtggtcacactgccgtccgtcgggtacatcaggtgagccgccatgttgaagccggcggcgcacacggggtcgccctggttgcagaactcgatggccttgggtccatacgtggagcttgagctcgcgatcgtctggccgaagagcttgagcgggttgccgaacgtcacgacggccttgatgcgcggtgccaaattctccgggatagttttaccagcgccgagcatcgtcttgatgccgatggagatgtccgtgacactggcaccctgagagtagccgcccagcacgaacacggtgttggggcattcctgagccacggacacgacgtggttggtcatgtcggtggcgcccgcaccagcgctcgtctggtcgtacgcagcgagatagttgactgcgtaggacgagacgctcatgccgccgaggttggattcgaggcccttgacaagaggctgaccagccgtgcccaacccaggcagctctccgcttccgcgcgcaaacacgacgtgaacgtcagagcactcggcggtgacgaggttggtggggttggcaagcagcacgagcatggatccgaggaaggtggcgaacttcatgttgttgttgttggggtggcgggggttgagacggggtggtttcgagtgtcggaacttggctcggtgtgtacagtgcactggaaaaggaagaatgagaagctgtcgactaccaaagctgcggactttgtatttcatcgaagctgatgaagctgcgccttcctcttctgtctgatggcgggcagtacgagcgtcggtcggatcttgccaggcgcggccaccacgccctctccggatacttcaagatgaggtgtagatagacttcatataatatacagtagtagctcaggtaccaacgtttacgaaaccaaaaagctggaatcacagatggatgctgcgtccaaaagttgagtcgccctgtcatcgaagaagcgcacgcaccatggctggagatcatatcggtggctgtttccgagcgaccacacagctgtacgtcgccacagtctggtgccctcgaacagcaaaagggacatgtcgaacgaggcgaacgcgttcagcgccatcggcgaggtacatgtattccaatccatacacatcctggcatcctgaccttgcgaccagtgaatcttgcatcgtggcgtcaataacagtgtaccaccgcgtcgctacctatgcattttgttatgtggcgacgtgggctcgactattcggttgagaaacattcggctcgtcctcctccaacagcgcgatctggcaaagccaccactcaccaagaaagtttcgtgtgcattcgacatagtgtagtgcacaccttctacgagagccgggctcctgggctcttgggtgaacccaaaagtcgcgagctcgggctcctgggctcttgagttcaataggttaagtgaaaggagccctccagaactgtgagccctcgttaagggctcccccctcacctgtgttaaatatctcgctgatggttggccgtcattgaagtatctccaggttctaacctgaaaaggcataggaaagagggcttctccttgaggggaaggaaggacgatcggcgacgctggggtggcctcggagcggctgtacacatatgagcggcgcgagatcttctagtgtggtgatctttgagctcgatcttctagcgtggcgcatcgatcacgcgaagttgctcgccttaagtctaggtaaaattggccaatcagatattactatgaagagcccgtcatagatttgaagctaaatttggggagccctggaggggagccaatggggagcccgaaccagggctccttgatctcgtacttaccatgagggagcccgttttgtgcgacttttggctctcgtattagggggagcccactcgtagaaggtgtggtgtagtgataattcatctctttccacagtcgtactccaccactgcaccacaaaagagatgtactgctgaaatacaagtacagtacttgttgtacttagtactgtagttctggtcgcgttttatcacgtcccttttggtgttcgagggcaccagactgtggcgacgtacagctgtgtggtcgctcggaaacagccaccgatatgatctccagccatggtgcgtgcgcttcttcgatgacagggcgactcaacttttggacgcagcatccatctgtgattccagctttttggtttcgtaaacgttggtacctgagctactactgtatattatatgaagtctatctacacctcatcttgaagtatccggagagggcgtggtggccgcgcctggcaagatccgaccgacgctcgtactgcccgccatcagacagaagaggaaggcgcagcttcatcagcttcgatgaaatacaaagtccgcagctttggtagtcgacagcttctcattcttccttttccagtgcactgtacacaccgagccaagttccgacactcgaaaccaccccgtctcaacccccgccaccccaacaacaacaacatgaagttcgccaccttcctcggatccatgctcgtgctgcttgccaaccccaccaacctcgtcaccgccgagtgctctgacgttcacgtcgtgtttgcgcgcggaagcggagagctgcctgggttgggcacggctggtcagcctcttgtcaagggcctcgaatccaacctcggcggcatgagcgtctcgtcctacgcagtcaactatctcgctgcgtacgaccagacgagcgctggtgcgggcgccaccgacatgaccaaccacgtcgtgtccgtggctcaggaatgccccaacaccgtgttcgtgctgggcggctactctcagggtgccagtgtcacggacatctccatcggcatcaagacgatgcttggcgctggtaaaactatcccggagaatttggcaccgcgcatcaaggccgtcgtgacgttcggcaacccgctcaagctcttcggccagacgatcgcgagctcaagctccacgtatggacccaaggccatcgagttctgcaaccagggcgaccccgtgtgcgccgccggcttcaacatggcggctcacctgatgtacccgacggacggcagtgtgaccaccgcggcccagaaggcggctgcgttggtgaagggtggcacccgatcgctgcgttcgtaatcacctacgaaacgctaggttgtctacctattgcatatgagtttggcgggctcaatgctctgctgtatgtagaatgcgtccaaaaagtgtatctgttctgattgttgaatacgtcgagttgctcaattttcgggttgtgttgtcattggtagaacaacccatcgattggttgctcagcccccatgcccacttttcaacctcctaagaaacagcacaaaactttgatgtcgctactgccttttaagtaaggtctcataacatggcagcgcttgagccccaagttgagggcagatctacaacagaaggctgataagatcacccgattgcggacagcacatgtaccggtatactatagcaccaacatgctcaggttgtagtagaggaccgacacccacaacccaggcatgccccttgacgctggcgctggcacaccgtgctgcggctcttcatttcaaaagctgacccgttcaacgcaccccacacaacagccccccccccccttcacctccataacagcgcgacgaccatgaagtttgcttcgggtatggccgtggctgggtgccttggcacgatcatcgctgatgtcattggcgttgcgattctcctgtacgaggagcgcggccaccccacgccgcccacgcccgatgtgagtagaccaaggaggaagtaaaaaaatcggcccgagtatttttttgataagttatcaatggtaacttggcatccgatacttaattaagcaatgggccattgcattgccaatggctaaaccacagactgtgctgtaaacatgacttgatctttttttaagttactgtattctgttaccggtacgatgtcactatcctatcacttggccacgataaggccgtatctacgcacgcagcgccctgcctcccttcaccaacgcagcagccttctgggccgcagtggtcacactgccgtcggtcacgtacatcaggtgggccgccatattgaagccggcagcgcacaccgggtcgcccctgttgcagaactcgatggccttggatccgtacgtagggctcgcgctcgcaatcgtttgaccgtagagcttgagagggttgccaaacgtcacgacggccttgatgcggggcgccagcgactgcgggatgacgctgccagagccaagagccgtcctgataccgagggcgatgtccgtgacactcgcaccctgagagtagccaccgagcacgaaaaccgtgttggggcacgcgttcgccacggacacgacgtggttggtcatgtcggtggcgccaggtccagcgctagtctggtcgtacgcggcgcggtagttgaccgcgtaggacgagacgctcttgccagggaggttggaggcgatgccgcggacgaggggttggccggtgattccgaggccgggggcctcgccgcttccgcgggcgaagacgacgtggacgtcagagcactgggcgtcgacgaggctggtgggggaggcgagcagcacgaacagggatccgaggagggccgtgaacttcatggtgctttggtgatggaggtggtggtggcttcgggtcgcgttgcttggtgtgtgtagaacaacggaaaatgaagagtgaagagatcgccgtagcaagtcgaccccgggcgagtcgctggtttgatacagtattgctgacgcgttcgttccggcttgctagtcgtccggtcctgttcttgtgggtcgctgcctgggggcactcaccttcttaccagccggccatcgacgccaaggatttgaggcgctaaaggttaggtttgtcgtcttgctgtacgatcaagatccattttggattgcttcgcactgcgaagttcgcagtgtgcttactgtactatggtgtgtgttgtaagaccgccttcggtgcatcgattgcaggcagaaagggatttgtcggtcgtgcagggccccaagtattcggagaccacatgacgcgctcgcaccgaaggaccggcgtgctatgtcaacggaggtggacaggtaccggtcaacctgtcggtcaaatcggaaagcacgcgtccccatttggtacatgcactgcaactacatgtatggctgacgcactctgcccgaccaaggtcgccctatcctatggcgtgggtgcagcactgttgatggttgtgagcggaacttgcatcgtgctgatcacgtgggctgcacagctgggaatcgcgcgcgaggcactccctcgctacatcataacgtttggtccagttgccgagggtggctgactcaaaatatgcaggggcacgcaggatatcgtaccgaccgtattcgacttttgcccggatgtatcgttatcttgccagcaccccgccgcctccaatgatgctactacagtagctgcagctgagtgcacacactgtagaattacagcgaatgagttgggcgctaccgaagtacggacagtgttggctcactgcgtcaatctcttgacttgtgcgctcgaacggtaaatgtgaggcaatatctctacccaaaagcgcggtctatttctgacaagtgtccattacttggcgagttactaactgtttagacctttttcggttcccgcacaacgacgctttttcatgtggtcgtaagttctgagttgtgtatagccaccggtgttcgagcctcgaactagccagctccatggtgtctggacgcctaattcactcccccctctctctctcttacgactgcaccaacgacaaagcactgtcatgccagcgttgtagaccaaactctgctcttgctattcgttctttcgcaaatataggcttagtactgtgccgatgcgtcttgagtaccgtgtcgggataaccaagcgtcctcaccctcgagctgactcaatctactgcaaagtacgggctccacatgtgcaggaaaccatgaaggctttcacgtgcactccggcactctttgaccacaaacaaggctttacacctactgtaccggtatctttcggtccttatcgggctgtgtcggacggctggtttcctcgacggagtctaaaaaccagctgtatttaaggtacagctcgtccagtgtagagtgcaacttaaccaaaatcgaaaccaacagtaaaaagccccgcgtagttacagtgaagttacctttaagaaattgcattgcagcccgcattaatgaatcgagtccgtcagtatagcaaaaacatccacagtgtatcttttttttaatacacgatctgcactacagggcgcgacttattgacataataacacggacaccactaccgccggcaaacaccaactaggcacgcagcttgcggctgccgcccttgaccaacgctgcagccttttcggccgcacccgacacgctgtccatcgggtaagtcatgtgcgccatcacgttgaagccgttaccgcagaccgggtcgccctggttgcagaactcgatggccttggggccgtacgtggggctggagctctcgatcgtctggcccatgagcttcaacgggttgccaaacgtcacgacggccttgatgcggggcgccaagttctccgggatggtgtcaccagacccaagcatcgtcctgataccaatcgcaatgtccgtgacactggccccctgcgagtatccaccaagcacgaaaaccgtgttggggcactcctgagccacggacacgacatggttggtcatgtcggtggcgccgggtccagcactggtctggtccattgaagccatgtagctgaccgcgtacgaggacacgcttattcccccgaggttggaggtgataccgctgacaagcggctcaccgcagatgccgagtcctggcatctcaccactgccgcgagcgaagacgacgtggacgtcagagcactccgcgttgacgaagttggatgggtttgcgaccaagacgaggagagatccgagcatcgtcgtgcacgccgaagcaaacttcatggtcgtcgcgctgttatggaggtgaaggggggggggaggctgttgtgtggggtgcgttgaacgggtcagcttttgaaatgaagagccgcagcacagtgtgccagcgccagcgtcaaggggcatgcctgtcttggcgctgggttgtgggtgtcggtcctctactacaacctgagcatgttggtgctatagtataccggtacatgtgctgtccgcaatcgggtgatcttatcagcctatctgccctcaacttggggctcaagcgctgacatcgtcggcgattcttggctggttgaccagtgaccatggccgtgactctcatgtgctacggacagcaagaaccccaactgatccatccataccgggaagtaatattataaataaatagaacgccacatcctggcatcctggcatcagcaccagctgtgccatggacacaagtggatcctgccatgctccctgcgtgcatgtagcgttgatctgtcggtttgtgacgtcgcgacgagtccttcactgtcgatgccactggaatgtgaaaggtttcctcagcacactacactcggtactaccgagtcggtagtacaagtaagcccccaagaaatgtaagctgtatacactatatgctagtagtagggaagtgcccaagcaccccgtacatcgctcggtacacttccgtttcgctgttttggggcaccagactgtgggggcacacagctgtgagaacaaatagccacccatgaccccttgtggtgcgcctctttgctgacaggacccctcaactttattctgcgataacatttgtcagcgattcgagcttgttatggtttcatatacattgataaccagactattaagctaagtacgttatgtgaagttgatcgacgcacatttgaagttttctgagaaagcgggcggacaaggtattaattgtggctgcgctttgacatgaccctccacattgtagctggattgcccgccatcaggtagaagaagaggcgggagctcaagttgcccgccatcagataagagagcagcgcagcttcgtcagcgtagaaatacccatcgctttgtcgtcggccaacctatcataccagtcatcgtttttcactgcactgcacacaccaagcaaagtcccaggcgactcgaagtatcttctcacaaccaacccgcgacatcaaccatcacccccattaccgtacgccatgaagttcgccaccttcctcggatctctgctggtgctgctggccaaccccaccaacttcgtctacgctgagtgctctgacgtccacgttgtcttcgcccgcggaagcggcgagctgcccgggctgggtacggctggccagcctctcgtcagcgcactctcttccaacctcggcggcatgagtgtctcgtcctatgcagtcaactatctcgctgcctacgaccagttaagcgctggcccaggtgcaaccgatatgaccaaccacgtcgtgtccgtggctcaagaatgccccagcaccgtgttcgttctcggtggctactcgcagggcgccagcgtcacggacatctccattggcatcaagacgatgctgggctcgggtgcctcaattccggaggacttggcgccccgtatcaaggccatcgtgacgttcggcaacccgctcaagctcttcggccagacgatcgcgagctcaagctccacgtatggacccaaggccatcgagttctgcaaccagggcgaccccgtgtgcgccgccggcttcaacatggcggctcacctgatgtacccgacggacggcagtgtgaccaccgcggcccagaaggcggctgcgttggtgaagggtggcacccgatcgctgcgttcgtaatcacctacgaaacgctaggttgtctacctattgcatatgagtttggcgggctcaatgctctgctgtatgtagaatgcgtccaaaaagtgtatctgttctgattgttgaatacgtcgagttgctcaattttcgggttgtgttgtcattggtagaacaacccatcgattggttgctcagcccccatgcccacttttcaacctcctaagaaacagcacaaaactttgatgtcgctactgccttttaagtaaggtctcataacatggcagcgcttgagccccaagttgagggcagatctacaacagaaggctgataagatcacccgattgcggacagcacatgtaccggtatactatagcaccaacatgctcaggttgtagtagaggaccgacacccacaacccaggcatgccccttgacgctggcgctggcacaccgtgctgcggctcttcatttcaaaagctgacccgttcaacgcaccccacacaacagcccccccccccttcacctccataacagcgcgacgaccatgaagtttgcttcgggtatggccgtggctgggtgccttggcacgatcatcgctgatgtcattggcgttgcgattctcctgtacgaggagcgcggccaccccacgccgcccacgcccgatgtgagtagaccaaggaggaagtaaaaaaatcggcccgagtatttttttgataagttatcaatggtaacttggcatccgatacttaattaagcaatgggccattgcattgccaatggctaaaccacagactgtgctgtaaacatgacttgatctttttttaagttactgtattctgttaccggtacgatgtcactatcctatcacttggccacgataaggccgtatctacgcacgcagcgccctgcctcccttcaccaacgcagcagccttctgggccgcagtggtcacactgccgtcggtcacgtacatcaggtgggccgccatattgaagccggcagcgcacaccgggtcgcccctgttgcagaactcgatggccttggatccgtacgtagggctcgcgctcgcaatcgtttgaccgcccccaagaaatgtaagctgtatacactatatgctagtagtagggaagtgcccaagcaccccgtacatcgctcggtacacttccgtttcgctgttttggggcaccagactgtgggggcacacagctgtgagaacaaatagccacccatgaccccttgtggtgcgcctctttgctgacaggacccctcaactttattctgcgataacatttgtcagcgattcgagcttgttatggtttcatatacattgataaccagactattaagctaagtacgttatgtgaagttgatcgacgcacatttgaagttttctgagaaagcgggcggacaaggtattaattgtggctgcgctttgacatgaccctccacattgtagctggattgcccgccatcaggtagaagaagaggcgggagctcaagttgcccgccatcagataagagagcagcgcagcttcgtcagcgtagaaatacccatcgctttgtcgtcggccaacctatcataccagtcatcgtttttcactgcactgcacacaccaagcaaagtcccaggcgactcgaagtatcttctcacaaccaacccgcgacatcaaccatcacccccattaccgtacgccatgaagttcgccaccttcctcggatctctgctggtgctgctggccaaccccaccaacttcgtctaccctgagtgctctgacgtccacgttgtcttcgcccgcggaagcggcgagctgcccgggctgggtacggctggccagcctctcgtcagcgcactctcttccaacctcggcggcatgagtgtctcgtcctatgcagtcaactatctcgctgcctacgaccagttaagcgctggcccaggtgcaaccgatatgaccaaccacgtcgtgtccgtggctcaagaatgccccagcaccgtgttcgttctcggtggctactcgcagggcgccagcgtcacggacatctccattggcatcaagacgatgctgggctcgggtgcctcaattccggaggacttggcgccccgtatcaaggccatcgtgacgttcggcaacccgctcaagctcttcggccagacgatcgcgagctcaagctccacgtatggacccaaggccatcgagttctgcaaccagggcgaccccgtgtgcgccgccggcttcaacatggcggctcacctgatgtacccgacggacggcagtgtgaccaccgcggcccagaaggcggctgcgttggtgaagggtggcacccgatcgctgcgttcgtaatcacctacgaaacgctaggttgtctacctattgcatatgagtttggcgggctcaatgctctgctgtatgtagaatgcgtccaaaaagtgtatctgttctgattgttgaatacgtcgagttgctcaattttcgggttgtgttgtcattggtagaacaacccatcgattggttgctcagcccccatgcccacttttcaacctcctaagaaacagcacaaaactttgatgtcgctactgccttttaagtaaggtctcataacatggcagcgcttgagccccaagttgagggcagatctacaacagaaggctgataagatcacccgattgcggacagcacatgtaccggtatactatagcaccaacatgctcaggttgtagtagaggaccgacacccacaacccaggcatgccccttgacgctggcgctggcacaccgtgctgcggctcttcatttcaaaagctgacccgttcaacgcaccccacacaacagcccccccccccttcacctccataacagcgcgacaaccatgaagtttgcttcgggtatggccgtggctgggtgccttggcacgatcatcgctgatgtcattggcgttgcgattctcctgtacgaggagcgcggccaccccacgccgcccacgcccgatgtgagtagaccaaggaggaagtaaaaaaatcggcccgagtatttttttgataagttatcaatggtaacttggcatccgatacttaattaagcaatgggccattgcattgccaatggctaaaccacagactgtgctgtaaacatgacttgatctttttttaagttactgtattctgttaccggtacgatgtcactatcctatcacttggccacgataaggccgtatctacgcacgcagcgccctgcctcccttcaccaacgcagcagccttctgggccgcagtggtcacactgccgtcggtcacgtacatcaggtgggccgccatattgaagccggcagcgcacaccgggtcgcccctgttgcagaactcgatggccttggatccgtacgtagggctcgcgctcgcaatcgtttgaccgtagagcttgagagggttgccaaacgtcacgacggccttgatgcggggcgccagcgactgcgggatgacgctgccagagccaagagccgtcctgataccgagggcgatgtccgtgacactcgcaccctgagagtagccaccgagcacgaaaaccgtgttggggcacgcgttcgccacggacacgacgtggttggtcatgtcggtggcgccaggtccagcgctagtctggtcgtacgcggcgcggtagttgaccgcgtaggacgagacgctcttgccagggaggttggaggcgatgccgcggacgaggggttggccggtgattccgaggccgggggcctcgccgcttccgcgggcgaagacgacgtggacgtcagagcactgggcgtcgacgaggctggtgggggaggcgagcagcacgaacagggatccgaggagggccgtgaacttcatggtgctttggtgatggaggtggtggtggcttcgggtcgcgttgcttggtgtgtgtagaacaacggaaaatgaagagtgaagagatcgccgtagcaagtcgaccccgggcgagtcgctggtttgatacagtattgctgacgcgttcgttccggcttgctagtcgtccggtcctgttcttgtgggtcgctgcctgggggcactcaccttcttaccagccggccatcgacgccaaggatttgaggcgctaaaggttaggtttgtcgtcttgctgtacgatcaagatccattttggattgcttcgcactgcgaagttcgcagtgtgcttactgtactatggtgtgtgttgtaagaccgccttcggtgcatcgattgcaggcagaaagggatttgtcggtcgtgcagggccccaagtattcggagaccacatgacgcgctcgcaccgaaggaccggcgtgctatgtcaacggaggtggacaggtaccggtcaacctgtcggtcaaatcggaaagcacgcgtccccatttggtacatgcactgcaactacatgtatggctgacgcactctgcccgaccaaggtcgccctatcctatggcgtgggtgcagcactgttgatggttgtgagcggaacttgcatcgtgctgatcacgtgggctgcacagctgggaatcgcgcgcgaggcactccctcgctacatcataacgtttggtccagttgccgagggtggctgactcaaaatatgcaggggcacgcaggatatcgtaccgaccgtattcgacttttgcccggatgtatcgttatcttgccagcaccgccgcctccaatgatgctactacagtagctgcagctgagtgcacacactgtagaattacagcgaatgagttgggcgctaccgaagtacggacagtgttggctcactgcgtcaatctcttgacttgtgcgctcgaacggtaaatgtgaggcaatatctctacccaaaagcgcggtctatttctgacaagtgtccattacttggcgagttactaactgtttagacctttttcggttcccgcacaacgacgctttttcatgtggtcgtaagttctgagttgtgtatagccaccggtgttcgagcctcgaactagccagctccatggtgtctggacgcctaattcactcccccctctctctctcttacgactgcaccaacgacaaagcactgtcatgccagcgttgtagaccaaactctgctcttgctattcgttctttcgcaaatataggcttagtactgtgccgatgcgtcttgagtaccgtgtcgggataaccaagcgtcctcaccctcgagctgactcaatctactgcaaagtacgggctccacatgtgcaggaaaccatgaaggctttcacgtgcactccggcactctttgaccacaaacaaggctttacacctactgtaccggtatctttcggtccttatcgggctgtgtcggacggctggtttcctcgacggagtctaaaaaccagctgtgttcggctaggaggaatgttagaggactggttttggccctcacctttagcacacagttacatgtattaatacttttatgcggatttatgaatagccactagctcgacgacgaagagcctttgaaccggaactgtattaataagaaacattcaaggaagataaatgacagcatgtgtctggcgcgcttcaagagcggccctaaaatgtttgtatcgacaggttctattgtggctgcagtatcatctctcagtcgtcttgcagcagccacgatgtagtcgctgacggacaccagggatctagccagcttttcgtagatgaatatgttataccctaacagccggcgccaccgggtatggaggtagattacggtaagcggggttgatgcagtgctcgccccgagtgctcccggcgataaccgcaataaaatatgttatacacgagtgatattttcactgaaaagcggcggctttaattgggccttgacaacgcagagtacactgacgtttaatcttggactgttacagtagtcgccaagagaataatctaagcaatacttcaatgcgtcttcgccttatacatgtaacgtattgccagcgcaagacacgacgcgattcgcattgacaagtcagctgctgcctatctttttatttaacggaagtaattaaagcataataacgtctgttatgctaaaaactcatttgtcatgatgcgaaaaattgggcaacgtcagcagacacacaccacactactaacttcaacatatatgaggtagcatgacgatcaaacccggtagcctgcgctttgccagactagcgcttacgcacgcagcgctctcgtgctccccttcaccaacgccgcggccttctgcgctgcagtagtcacgctgccgtcggtcgcgtacgtcaagtgagccagcatgttggcgccattgccgcacactgggtccccagtgttgcagaactcgatggctttggatccgtacgtggagctggcgcttgagatagtttcgcccgtgagcttgagcgggttaccgaacgtcacgatggcattgatgcgcgacgacagagtgtccgggatgacgcttccagtgccgagcaccgtcttgatgccaatggcgatgtccgtgacactcgcaccttgtgaatagccaccaagcacgaatacggtgtccggacactcgaccgcgaccgacaccacgtggtcggtcatgtcggtggcgccgggtccggcactggtctggtcgtacgaagcgaggtagtcgaccgcgtacgacgagacactcataccagagaggtcggaggtgatgccgctcacgagtggctcaccgcagatgccgagccctgccaattcaccgctaccacgggcgaagacaacgtggacatcagagcaatcggcgttgacgaggttggcggaggcggcaagaaatacggcgagggatccgaagagcgtggagaatagagtagcgagcttcatgctgttgggatgttgtttggtgtgtggagtgcagcggaaaatgcagagtgaggagcttctcgactaccgaatgggcgcttcctcgagcgcaccgagctgagccactatcagtgacaacaagcggcttgccaagtgccttgttcctgtcggttcactgtggcggaggtacaggcacctaccagctgaccgtccgcactaacgagttgtggttagagaagtctgctgctcctctctgttctacgatctggcaccagttcatgcagctttgagcggattgaaaggaaccgtcaacggcgcggagcccgaagtattcggagatcatggtatgttaccacgaacacgtttccaaaccttcctacttctgaccaccggtcacagtagtcacggactttcaggctgacgatggcgttgggggattacttctgcccgtgatcatcaagatgagcaagcgggggaggatgcagcaggatcgaaatgtgcgatgaaaaccgtgacttggtgcatgcagcaatgccgtttgacctacgtggatgctgttaaccatcttactacataggctaggacacagccgcacggaggcagctcagtacgctggcactaaacacggggaaaagtctgtgcatgctcacatgcgtcgagctttgtagatcgttttggtgcgaggctacctgtttcagctaggtcggcagagatagtgcttgagcgctcgggctttttccgcctcttgtcctaccgaccgcaccaaccacaaaagtgtcgctctcgcttctacgagcacaaagtttagtcgccttgtcgtccacaggtagtcctgcttgagtcagcccctgctgtccgaaacccatgagaacgagaacaaccaacatggctgcctcatcgcgcggaagtgttcccggaaaacagccgatccttagacacacttcaacgtgagggtgtcaacaacgtacagtactgtactgtaccggtaaccagaaaccaaggtcaggttgcgaacagcaaagtccataagcttaaccccacagacatgccgagggcaccttcgatctgacagaggatcaatccgcctcaagagattaaaaaggcttgtcattcctcatttgcccgcatcctactcaagcctcacatcgaccactccatagctcctcacggccatgaagctctccaccttcctcggatccctgctcgtgctgcttgccacccccaccaacgtcgccaacgcagagtgctctgacgtccacgtcgtgtttgcacgcggcagtggagagatggcgggtcttggcatctgtggccagcccctcgtcaagggcatcacctccaacctcggcggcatgagcgtctcgtcctacgcagtgagctaccttgcatcctacgaccaaacaagcgccggtccgggtgccaccgacatgaccaaccacgttgtgtcggtcgctcagcagtgccccaacaccgtcttcgtgctgggcggctattcgcagggcgccagtgtcaccgacatctccattggcatcaagacgatgctcggctccggtaaaaccatcccggaaagcttggccccacgcatcaaggccattgtgacgttcggcaacccgttgaagctcatgggccagaccatcaagagctcgagttcaacgtacggctcgaaggccatcgagttctgcaacacgggcgacccggtctgcgccgctggcttcaacatgatggctcacctgatgtacgcgacggacggtagtgtgacgtccgcagccaagcaggctgctgcgttggtgaagggcggaacgagagctctgcgcggttgagcgaagcaattcgcaccagttgtgtgaatgtgacgttgctgtgagaacacgttgaagtcaagtgtacatgtgggattaacgcacagttaataatcacgtttagtatcgttgtcatcttagcttttgagcttcaatttaaagtgtacacaacctaccaagtttgacttgaccatggttggttttaactatgggatgtcgctaatagcagcagtacgtctgcacacattgaaattcactatgaaattgtgcagcttgagcaacatccttcacgaggccgactgctctgcgtttgctgttgctgctgacccccggctgcgtcccccgatggaccagcagttgcaggcttcaggcaatttgccacctcgccatcacgccacaggtcactcgtggttaccgatgggaaagctgctggtttgacgaggcttagcgcattgcacgcagcttcaggcgcaggaatctaaaaaaagaaacatcacgataaatgaggaccccggcactcaagaaacaaccaggaaggcacactctttgcttaccggctcgtaatagacgctgtcgttgcggtgggagacgatgtccagatctcgactgatgatctgttgtgaccggagaaacacggctgctaacagggccacacgctgtttttcgtctttgttcgctgccatcttcgactcgtagctcttctcaagtggcaccactccttcgaagaacgctgctgccttcttaaagttggccacggcctgcacgcagcttcgcgcatcttctttcaacatgcacgcggcgccctggaaatacgtcgatatggcttggtaatagggatctttgtaagcgcaatacaggcgaacgcgctcggccgtcgtcgaagtcgagtaaggcagcagcctggacgcgatagtttggcattctgagcgagtccatacaataatacgcagtcagcaccgataaaatccgacctcaaaaatgagagcaatcgaagccatacctttgtatcgcgcggaaatgtccatggatagcttggccattagagtaaagtccacgacctctcgagtgactccacgcagcaccacgagctcctgcgcctcagtgagtgcaatccacgccagcaactgcgggaagcgtccgtcagcgagatctggaacgcgcttcagcatcgccaggtcctctgctgcgtccaacgctggagatttcgcgctggccgccactgtcgagtcgggtgctgctttctgcagcgtaatttgctgggcttgacgctgctcctcgcgccacttggccatcatgtcgtcgtccggcacagccccaaccacatcgtcggcagagtcctgggcttctgccttcgtctctgtctgtgcaccgaggtccgcaaactcagcgccgatggagcgaggcgcgatgttcatcgactcgagacacgcgtccaacaccccggccgcgtgtagcagcagctgatacgcgagcttgagctgcgtctcgtcgagctccgacagtctctcggacagaatcgcatccactttgtctctggcgtccgccatcatcaagatgcctgcagccagcagcacatgcgcgtactcttgcctcgcactcgtggcgtacacggtctgccccgtgagtgcgtcctgccaccggcagaagttgagacacccgctgcagtccctggccgaggcatttcctcctccgtgggccccccccacggcttcgtcggcctccgcagtgccttccaccagcggctgacgcagggcagcaccaaccggtgcatcggttaccggtaccgacgcctgcagcgctgcgtctgcattgttctgccgcgattccgtgaatcccttgacgagcgacaggtaggcggcgagcttctgcgtgtagttcgggatgtcgtcgggcgactgaaagacggaggatgacacagggccatcgccctcgagctgtagggcgacgcgcgcggcgctgaggtcgctggcgagtcgctgcacgccgtccgctttggtcgagacgccgaatttcgccagctcggaggcgaatttcgtctgcggaagggggcgagagaggaggttaatggcgtcgcagtgctgctacatgcagggcagttgttggacgcaccttggggctgcgcttgcggccgggcgtgagcgcgtggcagcacggcggaagaacgtctcgctgcgtcattttgggctatgctaaaatgctgcagtggacatgcaggacacttggactggattttcgggttggccaatcaggaagcgaaccccgcctaacctgctgaatggtccaccaccagctagaacagtatcacgacgtttgggaggatttggcttcaaacagctacgttcccaagagaccctgctggacggcctgctcccagacaccttcagcgccacctactcattatgctttgtgttgctcgagtgcctgtccgtgtgccggctgtgcgggcatgttcatagacgacctcatcggcgaggtcgtcgtcatgttccgtacatgatgtacggccaccgtattacattcgtccatcagtgaagacatggggcacctcttcgtttgggccaaaggttaccatttgagtcatctcgaggtcgagaattcaacattaccgtaaggtatgcaacaagcttacttactactttgaaaggaagaagtgtctaccacaacttgtggtccacaaggtatggaaactcgctcagtctgcaagcaagtgtagcgtacaactccaaaacctgggaagtcaatgcagcccacaaggagtgataggcattcagtgaccctcaatgcaagttggtaggagagcacacggacactgtgcatatatttccttagggccttggaggcctgacgcactcaaacatcgttgactcaaagagaacagttcaatgaccgagaagatcagcgacgcctacccaagtctctgcagtgtgtggcaggatcgtcccgtatcgagtggtaccacgcaccacaccaagggcgaacggcattcgcgcttcgtgttgggaatggcacaccgaaaacgaggacgggacctctgcacagcacttaaacacgccactcgccggtgtacaggcgtccccgggctagtcccggctgtatattttaatgtacctcgcacaggaagtacaacaagctctcaagatttgcgcgctacttctgcaaacatattgatttagatgagtgtacagcgagacctactgcgacaagtggcacgttgcgggaatacctccaccgtattcttgagctaagcttgtagtaagtcagtacatactcatttatgttcagaccgcgtgaatcttgttgattcgcaaacatcataagtaccactgtggcgaataggccggggacgcctgtatcggcattgccactgactcctggttgctggcgaatcgccagcaaccaggagctgtccgccaagtcggtctgagtttggccatgttgctcagctgcagcgagtcgctgcttggctcctcttggcatcttttgctttgtccgcacgcgggaactcgccgcgtctttgcaaaataaaaagaaggcaagtcttcgaccgcaaccgcctcgtcacatgtagcaacttgattccccgccgcgatcccagccggcgccggcccggcggcaccggaacacttgtcagcacagcactgcgcaacattctattggggggctattgtattaaaatacagtcgtgtagccttgggagctcgtgccgagtcagcacggagccctgcatttgagacggcgcgctggggcgattaatttctacggtaccaggaggccaaacatgcgcgtgcctgctcacgcagcagccattgcgtgtcaacggatggaggtgctagcgcttgccgcgcagatctcttcgtttcaggcgtcgcaacttcgagagattttttcctacatatcaaatgtctcgacactactggattccacctcggcggatccgctgcgagtcgcagtgcgacgaacatggcacttcacctcggcgcgggcttcgacgggctgttgagttctgtaaagcagctctactaaagctgcacaagggagagaggggcggctgatttgtgcgtggcgttttctgggctgtgtagcgacttcgcgattgacgaggcgctctctgtaggcagctggctgccagaggctacatgcacaagctgaatccgccgcgatgtttttgtgttttcattgtgcgactcgcacagtgcgagcacgaggaattaaataatacaagtagattggggctatttgtcaaaacgtaagcagagcatgggggactacttataagtagactgggggacgttgattaaacgtattttaactatcaccctgctacgcgctgcgcgcggccctccagaccctaaaggctcgctgtgctcgcttggacagaaccctaacaagcccgctgcggctcgcacgcgtcgcctccgcttcctagaagggcaatcctgggtcctgggtttgcatccgcgtgcttcgcacacgggctgacaaaccgcaggcgtgggctcgcttcgctcgctgtgcgctgatggtctgatctacttataagtagtccccatgatctacttacgttttgacaaatagccccaatctacttgtattatttaattcctcgtgcgagcaccgacgccatgtagacatgccagcatcaattgatacgtgtgcggcccgacgtcgctgccaacgcttcacgctgtgtcgaacgactccagcagccataatggcacgatcatattcgttataatgactcacaaggcagagcgccatgggtcaaaggcaaccagcctgcggcggcagcggagaccttggactccaaggcagcgccttgaaggcttgcttggtaagcctcccggctggcgtttacagtaaaagtggcccgtccctttcgcgtctagcgaaacggcagacgaggcgtgttggatccacattccaaaagacgatgcaaacaagaccttgtcgacccccgaatcgaacggggaatggctcgggacgggcgaattttcgcgcgcagcgggttaaggaatgtggcgtgtgtagcagcccgggcggcgcgactaacgaagcggcttcgtcgaagccggggggatgggttttcgtcatgctcactcggcacacgcccaaatgctcacggccagagcccgcccggctttggcgaccccacatatcttgcgacggtgcctgcgggcgcgatccgagcatgagtgcgtccaggcgaaagacgggccgcaccccgcagcttgaagtggagacctgctgcagcaggacttccgagcccgcgaagctgacaatcacgggtgcatctaaacaccgtcgggtctccgctcggctcgcgcggaccgccccatcctcctgtccgcatgcgcacgagctcgccctatgtcggcattccggataacgtgaccgcggcggcagcggcgcaggcaatcgccttgatcacggagaagttggccacttcaacgtcgagtcgagcatggcgggctttatagcactggcaggagatctctccttccaggccgcgtttgggccgcgccgcttagtcgcggttgccattgtactgccgagtcggcaccgcgtcccgtgtcccgaggtacatgtacctcggctggatcccgccaaggccgtcactcgagcaagcgccatttgacgcgggaccttccgctgtcggcggccagcgtccaggccaggccggaccccagcagacacctcaaacttcgaggctcgcaggcggcagcgacgagcttcctgccacgacgacaacgacgcccgacgagagcccgcccctccggaagacgagctcttgccagccgctccgcatactggcgaattccgcgcgccccgcgttgaagcgcagccgttagctcaccgaggcaatcgcgccggccgtgaccgcatcagccggcgaggcaagacgagccgcctgatacgtgccgcgcagagccgggcaaacgcaaattacgagccgatagccccagcggcagcaacagcaacagcgctgggagctcgaggcccatgcgaggcgaggagctcacatgagcgcgttcgccttggctcgcgcgcgaaggtctccgatcaacgggcgcgggaccccggggtagatgctacgttcgctcgcggtcgcggcattgcggtggtggtcacggggtcagcatcctgtacagtacgaacacagtaggccggcacgcgaaagccatgtcaagcctctccaccgctcggcagtacgtgtaatgaatgcgcgctgcagtggccaccgcctttgccggccggcaccgccgcccgagtatcttggggcgagcttggcacgctcgaagctcgaagcgacgtacatcaggtggtggcgcggaccgggccagctggcttcgccatcattgcaaacatctgctcggcgttatcacacggccaccatgatgcagccggagctgccgcggtcggcatggatgcccttcagcaacgggctgatgcactggagagcaacgcctccggccgcgcccgtggagtgaagaaacctcgtcgagcgagaccgccaggctcgacaatgctggacgtgggtgcggccactgccgtaaatactttgcggattctgcatttctggcccgggggagatgggcagcagcggcccgtctgcggccgcgatagatgcagtttttgagcgagcttgctcgcgatgcatggacaaggtattggatgggggcgagagatcgaacgcgctcgctcgcttttcaccaggacggccggccgcggcctcggcccacaatccgattcgcctcgagccgtgcaagccgcgctcgccaagacgggccgagtcgccgagcgtccaccggtctgagaagagagagagagagagagagagcaacacgcgtcaagcgtatcgtgtcacgagtcacaagtagaagacgatcgccatgcagcccacgaacagcagcagcagcagcaacagcgtcccgccggccgacgtcgtcgtcacggacccggcggcgtccacgccctcggcctccaacggcaccgggctgtcctcctggcccgagctcaagcagctgaacgccgccgtgaccgtcacgcctctggacggcgacgcccagctgcgcaaccgcaagcgccagcggccgtccgcgccctcgtcgccatccgcgggctcctcggcgctgagctccttccccacgcccggcgagctcaagctcgacttcgccggcttcgaggtcggcagcaacgcctcgtccgccgtcatgtcctcggccccgctgaccgtggccaccagctcgtcggccatgacgtaccccgccgccgccagctactcgagcgccgtctccacggacgacgtgctgtccttcctcaagagcctgcagctggcccaggactcggccgcgctctcgctagccacgcagcgtctggcccaggacggattcgactcggtcttgacgctggccttcgcggccgtgagcgagctgcagcgcgccggcatcgcggacgcccagctggtgtggcagcaggcccgtcgcgacttccaggcccggcggttccagggccccggcgtgcttgcgcccacctacacggtgtcgcggtggctcgagctgtgcggcatccccaagtcgtgcaccttcgagtatgccgagtacctgtgccgtatgggctactcggccgtgcgcgacttcgagttcatcgtccacgaccaacgcgcgctcgcagtgttcaagatcggccacagccgcctcgtggtgcactgcgtcacggccgcggtcaacaaccagcagcaacaacaacagcagcagcagcagcagcagttccaggtggctaactaccagtacggctcacatggtcccaatgtgtacactgccggatcgtccagcgcgctgctgcagccgctggacatccagcgcgagaacgagttcgacgtgcaggcctacgacagcttcctcgaggcgctgatcgagccgacggacgccgagcggatgcagcagcagcagcagcgctactcgatgccggctctgacactcggccgcgagaacctcatgggtagcgccgacgtgttcggcaaccgcatgagttttggtggcgtgtcggcggtggcgtcgcccgtcccatccaacatgccgctgcgcctgctcccccaggagcacctgcagctgctgtacgaagcggtgaacctgccgcgccccaacccgtgccgtcggggcaagaagatctactggtcggtgctcgccacgggcggtatgaaggaggaccggttcgcgcccttgacccagttcacggcggccgagctacagaacgcgtacctgcgccagttcgagctgccggccagcaacccggtcaagatggacgcctggagcgacgacaacattcgccagctcgagcacgccgtcaaggacccgcgctgccgtcatctgtccaaggtgtgctgggagatgctggccacgggccgcacgggcgtcgaggagtacgcgcccctgtccaagttcactgcctcgcagctgcgctcgcgcttccgctcgctgttcggcgacaagcggcctcagaagctgcgccaaaagaagcagatgctcaagctgcagcagcaacagcatcagcaggagcagcaggcaaataacgctgcgatgatgaacgagcgatcgatctagggatagtaggagtgatgaagaattgttgtagtcaataaaatgtgcgttttcacaacacctttgctgcgttgaagccaagtgcggttagcgtctatctatgccttgtcgacgtgatggctacgttatcgtgatgcactgagagggaatcacgttttgttttgaggtcacgattcatgacattgacgtcgaagttgcaagggacgacgcaagctggcagtgaatgcgaaagccctgctcggattgtcagcgtaggttgccgtcgggctacatgacatacatgcacactacgttgtagtgaaccaagggtaaaatactgaacgggggtgagctgcatttcgctgaatagatgatcataggagtttagttctagctattgagacatacaatacttttaatggggctggctagtgagccagttggttgtcgccgcggaggatgtgcgtggggacgtggtggggcgtgacagcggcgccctgactgatgttgttggccttgacggcctcgggacactcgaccttggcgagcaccaccttgtccttgacgcagtcggtcgggtcggcttcgctctcgggcttggccgtgctggacacggccgccgtcatggtcagcgacagcgaccggcgcagcgagtgcgcgttgcggcgcaggaacgagatcggctgcttggccgccgcgaacgagagcgcgtggccggtcgcgggcttctgcacgaagtgcttggcgatgatctgctcgagcttcaggcgggtctcgttggcggccgagtccttctcgggcgaggtctgcgggtcgcgccagtagtagcgctgccacgagaagagcgccttgccccactcctgccggtcctccccgctgcaggcgctgaactcgagccgctcggcgttgcccagcgtgtaggaccggtccttgacgaacaccttgcgcgtctcgaggtagaagctgttgggcacgccgtcggcgcgcttctgcgccttgacggtgatcttgcagcccgatagccgcacctcgctcaggcacttggcgcagtcggccgacgcgaactgccgcaggaagccgtcctcgagcgagaagtagcgcaccgacgggcgcgcatgcttggcgtggacgatgaggtagccctggcgcgtcatcggggagtgggtgggtgggtgtcttggatcgactaccgacggacaggaggcgaattggcgactgggtggctgactcgaaatggcccgacctgagctgcagcgaaagtgctggcggcggttgcgctggacttgtccggctcaaagatagatagagcaaagtgctggagtgctggaggaaacgaccggcacgctgtgccgctagctgctgctgcttgctgggcaatgaatgggacaatgggcactgaacaagcgaacgagcgagcacccactcgccctgctttcgccagccgctgcatcccagcttgtcgctcgcgatatgtctggaggagccttcgagagcctttggctctttgcgaggacagcgacaacgagacgaaacagagccacacaagcatgaacagctgcaatgtcggcaggtttccgggagcgacacattgccgactctattgattaggataagttaataaagcgagcgctctcgaataagggccgtcgtcgaggcgaggctgcgggcacgccaccaccagccgagatgcaggcacccaggcttgccgtgcagagagccgctcagccccggaggaaccagcgctgcaccacgacaaagtagatgaagcagcagaccagcagcgtcatactggccgccagaaacctggacaggaagcactcgcggcccgggtcctcgtcgtccgcgacgttccgcgcgtcttggtcatcgtctgcgtcgtcgagcagggcgcgccgttgctgctcagaggagtggcgcgttttcagcagcaactgcccatttgtcagcggtttgaactcgacactcggccgcctacgctgctcggcctctgcgatttggatcgcgcactcgggcgcggaggtctcgaccatcagtgaacttcactgagaagagaagcacgctgcttccgacgcgacgttgagccaaaaatgtacgtgccagcccaacgcgcatgacgacttcgaaacggtcgtgttgcggtctaaaaccggcaaggtcgctcgctgcttcaccgcaaagcgagcgagcgctctgctgccctgatgtcgctgctgctttcgaggctggcagatgccgggcactcgacattccagcacgatccgcatcacacagattgcctgcttgaaagctgaacattcgacctgctggattcgggatggcgacggagaggcagtggaatgctgtgtgatacgtgcgctgaccaagccccgcaaggtttacttatcggtggtcagcaagtcttccaagtctttgttggtctactgtagttagccccagattttgcttggtgcctcactattgggtcagctaagagcggcagggggccgggaccaagagggtgatcaaggccatggcgctgctgcaggcccagcagcacgtgatgcaggagaaggaggaggatctcagagagctactcaatgggcttgccagcgcccaggcggcactgcagcgcgtgcgggaaacgaaaccattctaaaccctagtttcgtccactcgccctcgagatatttaaggaaaatattcagatatatgcgcttattttttttaaaaattggatcggcttgaagcgcgcaatgcgggttccgcactcaccacttcaactttcattccgcattctccgcactcagaggcaagcacggcaaggcctgccgcgcgcgtgcggacagtgcggttgctcggagagtgaggtggctgtggtaagcaagaatccaagacatgctaaccgggagttgctaatacgtcgtctacatagagcgataatgcctggagggcgccccaagagccaagtctggcagctcttcgataaacacgccgatggagtgaagtgcaagcgttgccctgccgtcatcgtcaacccaaagccgctcaagctggagagtcacttggcgaagtgctcggggtacacgcttctagagaaaaacaagaggaagcgcgtgtcggaggagcgggaagaggagcgagttaggcgaaacagcagggataatggagctgccgtaacgctatcgccttctggagacggatcggctaccctgcagggagtctctcaagccgagatggagatgaggatcgctgtaacggggtacaatcatgtgtacccattccatgaagagtgacgggtgtcactctcccgagtacatggtacatggtaccagtagcaccgcaagccaaccatttgagtttgtgtgggcttttgtatagttaacttgtagtttgtattatgaccaagttaacctctaccaaaacacagtcagtcttataacctactcctctgtagcaaaccgttcccttcgaggccgggaactggtgaactgctgttcacctggatagtaatatccacacgcacttcctctgtgcattgtgctgtgtgaccccgtcacacttggtagcactcgtagtcaatcctacgcctacgcgggtagattggtctacctgaatcctcggtggctcaggtctgtgagccacgatggaccgaagtgagtttcctcacttgactgactcccagttcgagtcggtgcggaagatggcgggcatcttcggaagagatgccatctggagcttggcggcggcgaagccagaagagcaggtcgagcgggtgagcgcgtttgacgagtacgaatgcgggctcatcgctcatgtgcagggaaacctgctggctcagatgagtgagcccaaacgggtgcagcctaagcctctgcggccagctgtgcctccgttcgaagggaaggaaggtgagaaccttcacttctggatccgggagaccgagattgcaatgagcgcactgagaaccttcgagtcgcctttgcgctctccaatcttggcggacgtgccaggacttgggtgtatacgcgcgaagcgatgtcgcctggatgtttcacatcctgggctcagttgtgtgagcagctaagagccgcttttctcccggacaacgagttccgccagcgctcgcgcttccttgcctgcaaacaaggggagcgcgagctgtacgcgtacgtacaggagatgcgcacgttggcagcctcgctggtggggaacccactgtcggaagacgtcaagatgacagtcttcgtggacggcctgaaggtcggtcctgcgcgcacgcagttgttccgcgtgcgcaccgccagtatggaggaggcgatccaagtcgccctccaggaggagtacagccataagcaggctggtgctctggtttttgtacagcctgtggtcgctgacagcgaaccagaacccatggatctgagttcggctgagcagtattctgtccgctgctatggttgcggcggacttggacactacccatcgccagggtctgtgaagaagacctacccgaagaccagagggtcaagggggcgccgacgccatgcaccgtcaggtgctcaagggggacacaaccaccagtaaggacgacggccttgctggggttggcccgagtctttgtgatgggtgtacggaaggcgtacaccacagattcccggggtcccttgcgagcactgacgctcgcattggtgaaggacaacggtgggttgtcggtagtacacgtgagtgtacgggggtaatggtatccctagacatgattgagtctgggacgtcacaagtgccaagactctgcgagagagtcgaagcacaagggcaggtctcattgactgaggctgggccgaagaagaaccttggggtccgctgtgaccctggctgccgcgctcgagggcgctgacagcaatggaaccgcacatggtcccggacatggaaccgtacatggtcccggacatcgtgccgaagtcggccctgggcatggaaccgttcatgagctcggcttgaccaagtatgacttggccctgagtgcgccgtgcaagctgcacaggctctcggtcgagtagcgcgacaacgccttgtggctaagtcagccctctgtgtctgacagagcattgttgagtcatgttcctacctctggacaaacacaagggcgtccgatggggccgccagggcgctggatgcatccgacaagacgaagaagaaggaaggaggcatcactgacatgatgatctccatgaagaaggtgcagtgtatctgcaaccgagggctgttatgcctggcatgtggagctgcctcaacaagcaactccagtgctgagagtcattgctcggcatgagcattgacaagggtggtgttcgatgacaccaccaggtgggtaaccaaggaccactaactagcgggtaacttagttccgcacagagcatgtaatgctgaggaggccgctcaaggcacctccggcgtgggtaaccaagtaccacggacggtcgcccagaccttaaccgaagaggaacgcgctgcacgcgcttcctgtgtgtgtaaccaagtaccacacacggtcgcccagaccagaactgaagaggaaggccctgcaggcacttcctgtgtgggtaacccagttccacaccaggtcactcagacctaaactgatgaggaaggtgcacgatgcacttcctgtgtgggtaacatagttccacacgcgtcactcagacggtaactgattgtgaagccgcatgatgcgctttctgtgtgggtaacgtagtgccgtaaggctccgcatgagccgaaaggagtcgctcgaagcgacttcagcgtgggtaacttagttccacgcacggtcagtatgaccaagactagtgatcaggtcacttgggtctcctcgtgtgtggtggatgaccacacggagtttaagaggctcgtgacaccgtcacgatgtcatagctgcacggtcctcttgaaggcgccgcgcggctctgattttaagcgggggaggagtgcgcggaagcacttccttcctccaagggcttgacacccggtcatcatggatgacgttcgactgggtgtcgaccagcgcagctgtggtcatgcgcacagaagccgtggcttgggtacacgacgtacctgtggcaatgcatgttgcgtcgccgccgactcggcgagcatggtcgagcacgactggagtgtgtctgccagagggcaacacctcaatgaccacatgcaggagcatgctcggtctgaaggcaaaggccgctgcgcggcagagatcgttggtacggtctgtcgcggatagcactgtgcggcgttgggacaacaagtgtccatgactcggtgccgagatggctgagtctgagtatgcgaacatgccatgcagctactctgaatgcaggacaagctatacgctgtcatgggtgccatagcttgaagacgtgggtaacagagtaacacgtcaagtcacgcagactcaaactgcatccaggctggtagatgccaagccctggtcgacgatgttgacccagagccaaggaagggtagctgcccgtagtgactcggtgctgcagggcggcgcgaggttagacggccggctgccgcctgacccgccggggctcaaatcgtaagtgggggaggggatcggaagtgcccttcctcaccgaggtctctggcatgagacttgcttcgtcgtagaagccagtgtagtggctgcatggtgcagccactcacgaagtattgcacgaaggtgctggacctgatgcatcgctgctcaggtcccatggtcatgatgaccaatggccagcaaccttggcaatggctactgttgctgctaggccgaagatggcacgcgcactcgctgctggaaggctgcctcggtcaggcaaggacatggcagccagtctgtggcttggtccgcggacgatggcatgtgtacatgcgcaacaccatgacgcagcgtgatgctgttgctacactggacgcggtacgtctaccggccaggtagccatcagcaccaagccaaagctccaggctgttgctacgctgggtgcggcacgtctgccggccaggtagccatcagtcccgagcatgggtgttacccacgaggggataacccgaacgtgttgcctttgcaggcattcacagttggcgcggcacatgccacacctgtaaggcacgaagccatacgcgtgcacgcggcacatactacctgtgagatagtcgcggtgtgtgacgctcactgtgcgcgtggcacttcgtgtacgcgatgtacccgcagtgcacgcgacacttcttgtgcacgtggcacttgaggtgcacgaggcacttatggcagtcgtggtacgtgtcatacacgacatgcctttggtgtataaggcggtgccctcgtacaccttgaggtcctgtatggactgtgtgccatgcggtcttgcgcgcacaccgacttggtgttggtcgccgcgacgcaggatgcaatcgccggtgacggagggcaatacaccccacaccacgatgaagtacccttgcggtaccctggtgtcgaaggaagacaccttagcgtcggcgacgtgatggccgtgacgcgctgcagggctttagacaagtccgccgcgttgctctgtatgatgagcgggttgctggaagcagccatggtcgctcaagcaaacacgacgttgaagcatgacgcttcatggctgtggtcagcgcttgaccatagcccatgggtcgagccgacgtattcggccgaccggcacaccgtactgtgacgagcggggccctgtcgggccgctgtcatggccggagatgagcagcacagctctctccatggttacgctacgcgctgaccggaaaagtgctgtccctcgcggggggcactgcagcacgaacgtgccagcgggggccgagggccatgcgacgccaacggctgattgtctacgaggacactgcaagtttggaggcacatgcatcccgtgccgaggcactctgcgcctgctagcgctgtggatacggccactaaaggcgtcggcttcgcggccaacatcgccgacggcagggggttccgcgcggggtgcccgctgcgggcacaagtcactgtaggcgtgacgatgaggcgcgccagccttgcagcggcgtcgcccgagaattcgacctttgggtgttcggattctctcgaagctgattggagaatcagatgtgattctcagataagtgggggaggatgtaacggggtacaatcaagtgtacccattccatgaagagtgacgggtgtcactctcccgagtacatggtacatggtaccagtagcaccgcaagccaaccatttgagtttgtgtgggcttttgtatagttaacttgtagtttgtattaagaccaagttaacctctaccaaaacacagtcagtcttataacctattcctttgtagcaaaccgttctctttgaggccgggaactggtgaactgctgttcacctggatagtaatatccacacgcacttcctctgtgcattgtgctgtgtgaccccgtcacaatcgccaacttcgtgtatgaatctggatcggcgtttcggatcgttgaacttccctccttcacgttcatgatgaacggcgccaatccagtcctgaccattccatcggcgaagaaggtgggcgacgagctcctaacggcgtcgttcgagcagcacacggagaaaaagtatctggtgatgcaaaaagaccatgcgttcgttgcagtcgcatttgacgggtggtcaaatttgaaacgcgagaagatgatcaatgttgtggcgtcaagtccgaacatgggtgttgtgcacatcaagacgattgctgtgggattcgactcgcaaaccggcaaatatatcgctaggcttatgatcagagaaatcagcgagttggaagacgttatcggtccgggcaaagtggcaagttgtacgaccgacagtgctggcaacatggaaaaggcctgggagattctcgagaagcgtggaatcttttgcaatggttgtgctgcccatacgtccaatctgctgctccaagacgtggcgaagttggatgaagtcaaggcagttgcagctggtgcggaggcatttacggcgtatttcatgggtcgccacaagcttctcgcgcgtttcaaggctgccaaacttgagctggctcagtccggctcgacgaacgtgcatggccgatcgtttacgattccagttgctacccgttggtactccgcataccagtgccttgtgaacgtcattcggaacagagaagctatcaccaacgttttcgacgacgaggagctcatggagtcatacaaaggcatcaagaagcgacgtgtggtgctcgtacctgccccaaccaaggcatcgaggaagagcaatcgcaccaagaagatgtcgaggaaagtccaagagaatgcggatcagcagcagcaacaaaagtccgcgaaagagattgcttttgaaaaagttgaaacgattgtgcgcgacgaaaacttctgggagaagggtgagcaagtcatcaagcttttggagccgatcatcgagaagctggggctgatggaggctgatgggacctgcatatcgctggtgtactgggcgttcaacgacctcctgaagaagcccatctacagatccccaacagttttggtcgatgcagcaaagcaaattcatgctttgatcaaggcaagatgggataagatgcacaccgatgccatggggatcgcctacttcttagacccgtcccaagatccgcgcggtttcgttgacgatgacagaaataaaacgaagaaccagatccgtaaagtggcgaaaaggctggggttctcaaaagatgaagttgatcaatgctttaaggaggctggtgtcttttggaatcggaagcgggactggacgccgaagcagcggaggaccgaatcgcgtacggcccccttagagtggtggggcgaagagcgtgacaagtacccgattttgtcaaggattgcgcgaaggattttcacgatgccgccatcgtcggcagcgacggagagaaatgggagtacacacaagtacatctactcaagttgtcggtctcaacttggtctggaaaaggtcaacatgttggtgtcgctgtactggagtcacatggagaaaaaaccgttgccaccggttgtgtacaacccagcaacgctcggcgatgacccaactattgaaaacgtgccgagtgtctacttcgacgctgacgactcggatgacgacgacgatgatgatgatgtctcaagttcaagcgacgacgaagacttcgacgaggacgcagacgatgaagatagcgaagaagtcaattctgcagctcgtgcagaacaagacatcgtgatccaagagcccctggactactacattgacaacacctacgactacttaggcgagcatctgtagttgcttcgaacaactgaagtgagtggttcttgcgtacgtttttgagctaatttaattaatttatgagagagagaattgcatcttgcatcttgtagactattagaaggcggcgagcaatgaattgcactttgatagtcacttgtgccgtcggtgtcaagcagtttattgagcagaacaactttttcgtgaggcccgtgagtttcattcgtagattcaacaggattcatttctgtttcatccacgaaactcagataaatctgcggacgaaacacacactagcagcggcaaatggcgcgcaactttacgtccagagacgagagctcagcccgctttatcgcagtaccgtacctcgcagaaagaatggttaactgccgtttcaaaaccttggggaattcttttgaaattaaaacgtagttttgaccaatcaaacacgtataactactaaatacttagtattaacaagacgaaacttgttttttttttttaagaaactggagttattttacagtagtttgagcaccaaataaaaaagaccgaaagtagtctttctgtgggatacggtactgtaacctgtgtagaatactacataaggtacggcgccacgttagtagtgagtgctcagtttaagaaaacccttttcagctaatgataatgcaggaatcgaggcaccaattgctatgattggtcgataacatccggtgtgtagcaacgcgaatcaaacacatggcatttcaacccccccccaatcaaaatctctcgtaaactggcgccacctgcgattcgagatggctccaaggcttacttgtttcttgggttccgtgcgtcgcgtttgattggttcttgtcctacaaactgtcgaaattgccctctttctcgctcctaccaaaagcacggtcatacgccaaaaattgagactgctaccacaaagtaaaaatggcactccgaaatctctcctaaagtggcgccgtatcttaacatagtactctacacagcgtagtctaggttgtatgtttcgattgaagcacaaagcaaaaactagtttttaaaatcaaaagctattttaatagcttttgctaaaatagtcgcaccctttgcaaataagcttggcttgctatcgtgttttctcaaaacgagctgttgaagttgccccgcaccggatatagaatatttaatgatcgattcgatggtaccgtctcgtgctcacttcgctcattctctaatctgcctcagtgcgcacaaggctgttaccaaagctgccagccaagacatgttgaactttagtcacttctgaagacagttcgtcgagatcaaggcgaccgttgtgctgctggatgcaagttattggaggcggagaggcagcgctggggcgacgaggacagagctacccgaggtggagaccaacaatgacgcggagccaagcgcaactgacgtgacgacaaacgacagcagcgttggtatgaagtgcgtcggagagtgagccagaagtggtgccgcaggcgagggaagacgcctgtgacagtgattttgcgttggagcagagtgagcgcgggtcggcgagtgattccgaaatggagctggagcttgatgaagacaacgaggttgaggacatcactacatacgattatcgggattccggtgtgaaaacagagctggacgcggatgctactcctgacttttatatctaccgatcctagccatccccattaacgtgaggatagagaagctcattggcgacaaggcgatccgcacgcgcatctttccctactggcgtttcgactttggcggatacgacctctgcttcggcaacctcaccacctacgatgagcacggacagcttatcttcagcatcgtcggagactgggttgggaacgtgggatccgatactaggccataccgaggcagatgactgtggaaattcgggtatagctcgaggagcttcttgatccgcattcgagaactggtccaggaaatgctagcctgtgactttccgaaggaagagctcgagaaggtggagatggcggggggggggggggttggttggtctcccgcgcgagaagaaggctccccattgtgatgaagtggatccgccggaattagaagggatcccacactcacacactgcgcccagacaccgactaacggagagggtactccgataaccgtaggttgctgaatggctcacctcgtgtacccgtcggcgggctggatctgctctctcgttgactcgagacacgcaggtgatgagcttgaacgcccttggcggggacttggggatatgttggggtaggtgcgcagtggggttccttcacgcgggtctgagtaggtcgatccttggtcttggccgtacatcttgtggatccgataagtaatataccagatccggagtcgttgccttgttgagggtgttgtatccttttcctttacattgcttgccgcctcctattagcggggaagttggggggggggggggggcgaagggcgcgagctactggccaagctatcctgtagtctaccacgtttgcgagggtaaattacttgattacagtatgtgtaatgggcctaatttggctcactacttcagcttacacgtgtgcgcacgtgtgtgatgaagcgtatcttagtttaaactagtgttaattatactcgggcctccgagtatagattaatctaaataaacgatccaaaaaatgtttttgggttaaaatgagaactgctatttttgttttatgctttctgacttcctctaaatgtaatattctaagttaggaatttgccaacggctggttggcagaattccaatgctatgcatgtcgctcattgacgaaaatatgctgctttcagccaataggaaccctaagtctctttggaccacccgtcgtggtgatcgtaaatgtatgtagtctttggtgtgtcttacaccaaggtcgagaaagtctttcgaacctctaacagacgtcgtgtctgttagagttacaagtgactgtagccacttgtgcgtgtaaccctgttacagtatgggccaatgcaaatcccaatactaaagaccaagtgagtggttcccaagcaaatttgactctgatttatgttagcctgtacccagccttcccatccggctcggaacctatcccgctgtagccacggtacccataatttggtacatacccatacttaatctacgtggtcctaatttagatgacccaatccgtgtgcaccacaccgcttgtacctggtccaacttcaaccgacctactccagcaaccataccctgatccagcaaccatgtcgttatccgagcgacccggcaacgtcaccaaccgccggatcccattatccggtcaactagcggatccgattccatcaagaccattcttgagcggttaccacattcgcccctgggacgaggtcgctgccgcgcaacggcttcatctcgtgccacctttgatccacatcattcgaagatttccttggtagctgcccaaatccactcaccggaaccggctgcctccagacgtctcctgctccacaatgactccgccgcgtcaccgtcatcctgagcccgctggggccactacgccggcacccgacccccgtacgaggcagacgtccctgtgccaaggacccgtgtcgctgttgtcatagggtacggccgctctccgactcctcctccaccgtgcgtcatctgcgactccgcaccctccgatcacctgcaggctgtcatgcccctcgcgttgtccctgaatcctgccgacgtcattccttcctcgctgctggctgtgatcacccactaccgcagtgtattggccgattacgacgagttgcgccgtgccaacacccttgacccgcagcgtacgaagaacgccacgcagcgccggcgggtttgcgggagactgcgatccagtacatcgacttcgtccaacgcaaataaacctcgagtcaagctcgcctcgacgacgcgaacctccgtgcggctgatgccgtagccaggatggatcgcatgaaggacgagctgcgccagttcgaggtgctgaagattcagcaccacctgctacgcgagactttggctgaggcgattacacacctccaagattacgctgcaagactggaacgccggatggagggtcgcgtggttgatggagagttgcatggatcggtgtcccagatcgctccggacctgagggatgtacgccgcgagaactcggatctccattgccagctctcggatcatcacaaccaaattcacgccgtccaaacatccaaggccgccgccgacgctgatctcgtccagtgtcgcatgcggtgcgacgagatccagatccgtcttaaggacctgctgaaacacgcccagaaggctgagaagtctaaccgccagcttcgggaggacttgcccgtcatgtcccgtggtgacccagttgttcgctcactccgcctcgagctccacgtccggggcgaacggatccgcgagctggacgggctagttgaccgcgtcaccgcgcatcgggatcggctccaaaaggatctgcgcgacgccgaccgccacgccagacttgccacggctgctgcggaacgagccaacgaagctctgagtcgacagcacgacgcaacgcacgacgcacagcgccgtgcccgcgatctcgaaggccagccggaccggctccgccagcatcgggctcagcacgcacgtgatcaccaagccctctccgccaacttccgtcggtcgcaagagcgattagcgcaagctaacgcacgcataggcgagctcggacaattgcgtagtgagaataacgtcctccgggaagagctgcgcgtcgccctcgctgcctgagacgcccttcaggctgacaatgaaaatctccaagtcgagctgatggctgtccaagagtcacccgatccgacacccgctgttaccgcccctccagctccagcctcccccacatctcgtgccgggactgccgcgagtttctggcgcaaatcgaggactttcaaggcgcctacggccacctgcgtcgtgacttcgacgacgtgaaggttgattttcgctcgctggagaccgagcatgatgtgttggagacgttctacaccgctctgactgaggatcatacgttcgcactcgagcgtatcaggtagatcgtctccgtggccgtagttgtccctcctggcgtctccggcattgcatcttcggaggcccgtctccagcccgctggttctcctcctggctcgtctgacgtcgtcagccgtcgtttgctagatctgatcatgggtaagctcccgcaaccaaacgtgttcgtcgcggatcgtcacccgtgtgcacatgttccgaatcctcggctgctcgggcctcgtccggtctcggtgccttaggagatctggtcgatgacgatcaggacgacggctgcgcatacttgggcgccagagcggagtccaacgattcgagctcggagggctccgtcgacgaggaactatgcgtggcccaagcccgctcccgagcttatctccgtcgtcgcaattcctgtggcgaagcgccgccgacagtctccggatccgcctccgcccctatcgaagtcgatgaggacaacgaggagctggactacgtggaggatgaagcgagcaccgaagatctcaacaactctcctcgcgagacgtcggtggccgcccgcagttcagtcgaagttccggaagctgcggttggtcgaacacacccttccggcgccggcgaacagatccccatggcgggcacagatgctgtcgcttttcgttctttcggtcctctggggtcatccctgggcttcgacagcagcgtgcagtctccgcagcggaagttgagccttggggagccttcgtagatctccgtgttaccatcacgccccgagtcatcattgactaccacgtactgaccgccgactggatgtttcctgagcgtgtcgaacgtggcggcaccttggatctcgctcggtacgcgccaggattgatcacacgtggtaacgtggaggctctgtacgccgaggagcctcggcgtctactcgcccagtaccctacaccttcgacttgtacgcctcgccccagttgttgagcatcgtcgacggctacctggagttcgagaacgactgcctgcaaacgatctgggagtcgacccacccgttcccgatctccaaggagttgaagcggtcagactcctggttctcctccttctacacgagctgcaagaatcgtagctcgcacgctcatgagaagtaccggaactggcaagagcaaggtttcggaaaggcgcgccggagtggctgttgcgacttggatctctggctgaatcgcatgttcgcccgtttcccccagccgagcgaggacacgacgtggttaccagctcgtgaagccatcaccgaggggcgtctagtgccgacgagtttggtggcggctttggttgactgcgatcgagtcgattcgtggcgtaaacacttccgcacggccctcgacacgcacccggcgtttcgaatccttcaccatcggttgaagttctcccgcacctgagcgctgcagttagggctgcagatcccgcgccttgcgcgtctagctttagtctcatcttggtagcagaattcagtagctagtcgcccgattgtatatcgtaatccaatttcattccaccgttcgtaattcatatcgtcacattttcctccaccttcgtcagatccagttcatcgttcggcattctttctgcttgttcgttacacacacatgcacctctggccctccacaaacgggcaacctccctgccctacctcttcgtcagttcacccctcgtgacgaccagtccgtccgagggatcccctcctccgttgatgctgcagccgtcctgctgatgctccgccttgaacttcatgtctgtcgccagccgacagacacggtcgccctcgccaatcttcttcatgtgactgcatgacttggaacctgctccgtttcgcacgggcggtcagaaaatcgtagatcagtgcaccacagttcagatcagcctcgttcacccacgagggttcttcgtaccccttccacgtgatcatgaatttgcgcagcgcgtgtccatactgtgtcttccgtcccgccatcatgtccaggatcctctttactccaacctcatcttcttccagcggtcgatcccagctttcctccggcagtagagcctcatcgaaatcgaaccgatctgcttcctccactgttaacaggatccgcggccgttcggggaactctcttaccggcttcaatttggatacatgcactaacggaaagaggtggtactcggtccccgcggtctctagtcgcaatatgtactcgttcaccaacgaagggaaacgcgctacctgatgataccaaaaacaagtcagctagagggctaaggaggcagtcgaaattgtagaggaatacaatcgtgtccatccatgtgtttacttagaggaattgctggaggcagtgaaggaaagctttggcaacgcgcaaagctattctaggcgtacactttgtcgtttgctaacgtttgatcttaaaattacaagaaacatactttctcagcgcgcacgcaaaagagagccagcacaagcagatttttttaacactacgtccaatttacactgtactagttgagaactagacggtagagatgcgctgagaaagtatacttggtcacgtcgaggcacacttgcgattgtcactctaccctttagtcgtggggagcgtttatcgagtttggctgcaattgatgcgtcagggttctttgcatgggaatcgacgtcgggtatgttggacagagttgcctttcatgacgtattccgaagaaaattgcaccgtatcttaatccgtgatcattaccaccaaggtacaatacaattgagacagtcttaagctaattatgtttttcatatactgtagatctatcggaatcctagataatgccaaaattcacatgtacaaggggctccgtcttccacgtgaacggtaggcagctaggaacgggaggtccgtacagaggggggggggggggcacatcatgttgtactgtgtattcagcacattcggtaacgcgtccaccacaactagctggacctggtacctattgacaacgctgcctgtacatcttatacttgcgtgagccgaaacaatgtacaactagacagatagatgcaataggggttttaatgtaagcatcgatgaggattatcgtttggcgaaaatgaggatttgctctgaccaaagatgcttctcgcgagacgcatcgtttgggctaattcctcgccaagctcatttattgcgtccgttttatctcctcggatcaatcaccttgggagtgccctcactaccaggacgatatgcaaataggacgtgtggggctaatgcactatgtgcactcaaaagataaaggagattcagggctatctagccatggtttcagctagcgcgtcgagaggattggtgtggaaggagagtgcaaacagcaccattttttcagcgtgccccggtcagacagctatgtgtgacaccagcttttgagtgaatttcaaatctgccaggatggatttgcaggcacatagccctgactcattttaatagaaaaataatcctcattaatgcttacattgaaaccccataatataagccatattagcgctgatatgaaacttacagtaggtagacaccacgtttccaagctcgagactcctgcgaggttgcaataccggtgagatcacgtccccagcatgtgcgcaatacaatcacagcacgaagcaaccgtcggagcggttgagaacgtcttgtgggacagctagaccacttgaagatttactgtggagccagcagcaccgtccacagcgcagacgcagagtagtggaaggtagactacacgctgaaccctgagcacaacgaccagtttgttttttacggttggtacgggcttctagcgcgagcccgcactgcttgttcttactggttaagtgctgatgtagttgtgccaaccatattagcattgatgatgaggagaggtcctaattaggtagtttttagctgccagatcgtgtttaaggctgaattggtagaaagcgcccggttttacccggtggagcgcgatagaattctgctagataaaatgagaatgcgtgaaaggcacaatataatacatgcaaggttcgatggaatagctccccatacagtaattaaaaaacttggtatgttttaaagagtagtgtcttgatgcatagaccacctctgtaagcataaacttggaatggccaaaactacgatttagactgagatttcaggatctagtactcagctcggtactaccagcaaattaatggtgatttgaatagaacaaacattgaacgaaagggtcagctctgatcacaggaagtaactgatcgtgtccaagctggccctctctgttggcgccagacacagcggtctcttgaccaagataccggcattccttgatcgacgtcgtagcgcgatttcgctgatggaatgcatcgtcgtgtcgtctcatgcgtgaagccgacgctgcccgatgcccataagacgcggcgtatccagagggctctagcacatgttgatatgcctctaggtattgtattttgtaatttacggaagtaatttactgtgtataaatgttgtgcatttatgtgtgttttctatttaggggtactgttttaccgaatgcatcacatgtatggtattgtacatgcagacgaaaagtggtataacctcgccaatggggccagcaagtactacttggcgccgacggagcagcttccgtatcgctcttgccccattaaacgttacataggcaagatcatgtttttggcagcattagcccgtcccccgggacggttgctaccacaagcatcgctttgatgggaggctagggatatggtccatcattgaagcaactgaggcacagcaaagctccatgatcaggcccaatggcgctaaggtggggaagagcatcccaactacgcggtcactctatcgcaacttcctcgccgagaatttgttgtctgctattcgagccaagctttcgggtaagctaacctatgtcactaagtttagctcgggtctaactgatctcatggtgtttgataccgttccgagaggtacaccagtgttcacgcagcaggacagcgctggtctccatatgtgtgaagatgacagggaaccggtggcgcagctaaggtggatgtctggaagatcacgatgcgataccatccccctaggtcaccaaagctcaacgcactggatgtgtgctttattttgcatctatccaaaccctccagtatcgcaaggctacttacgacaccgtagcaagaggcagttgattatgtcaagtggcatacatttgacaagggctttgtaccccctcaaaaggtgatggagttcattgttgtagacagtggaggcaacggattcgagttgccgcgcgtaggtaaacatgttgctgtcaacggacgcatgccaatgtctgtcacggttaaccaggactcggtcataaacgggtaccggcagttgtatttgtaacgctaattcaacaatcatatattgtcaacgtttagcttaaaccaatatgttatggttaactgccagtgctccacaataagcctcagtatctactcgtcttatttgaaggtcttctgttgcgtttggggcgttcctacccgtaccaggacgttgtaaaagacccccctaaaactctgccgatttttcccgctaaatttgatcttgctgcgaaaaaaaaaacttgttgcagattgaaggcgacacgtttgggatatcttgccttacgcaaaacagcacccataaccatgtaaaaaaatactaacgttcaggccgcatcaagaccgatttgtgatgtccgtaggccatatcagagggagctgtcatttaggagctaccccgtgaaatttggaaacgtcattttgtagtgagccagcgaagtattaatgcgtaattgatgtgatactagaagcccattaatctaacatcgtagatgaaaccgcgaaagtgttgttattggctacccacgaaatccaacgtttttttgcgctgaaaatacatattgtttgtcattagatttttctagaaaatggaaaatgtcatgtgaattttatgattgtattgttatactcaaagtgtgtgcatttggactaaatattacataaaattagaaaatatctagaatatttcgtggcctttgttatacaaatcgacattattattgtcatgatattgaccttcttttgtcactgtggacgaaaaatcggcgaaaataccgacttttggcgggtctgttttttttccttcgcggtattactatttccccacaccaaccattgcgacgcccggcccagaacttggccacactacgttttctttgtcgcatcctcccacttttcactttacttcagacagaacaccacccctactcaccaggcttgctgtgatgctcaacctcgtagtctacaccccatcctcatcccaccaaaccgttgtgctgttcttcttctcactgttgcttaacgacaacgatgagctctctgaatacttcgccggcaagatgtgccagtgcgtgctcaagcatgctgttgggcgcggctatagcaatctcgcctataatgtccgtgtcaagcaccctggcttttaggcgtcctttctgatttgggtcggatgcaacggattcgaccctgcgctttgatcagctataaggccagaattagtttgactggcttgaatgggtgatgatgggcaacttgcacttcaacgtttgcgaccaaccgctaacccggcggtaagtttttttattactactcaacgacattggttgagttgtaacagatacacgaatttgcgccatctatgtgttaaaacgttctgtagcgacatggagtctgtcaccagagccgtcgaggtcaagcttggctgtgaggtaacgagcaagatcagcgttttgctcgaaggctagacgcatgcttcggagcatttcacggccttctacacatgctatgagcgtaacggtgttcttcacgctccgctgctttacctcgcccgagttgtgcagcttcaaggaagctgccccagcccttgaagtcaaccacggcagagattcacctggcggcgctctggtttggtaataatattaattaagtgtgctgtacgacaagtgataaatgagctgtaaataaatatctggctcgaaccattgatgcccccccccccctccgtggtctgtgcgagtcgccgacaaacctggcggtcctgctgtatatgggctccactagaagctcatgagcaagctcagatctttgaatcaagtggcgaagctacggtataattactactctatgattagtactacctctgatccgaaaaacaattgtcccttccactatgatgtgtccacataattttttttcttccgattggacaaagaagtgatattgtttttaatttgtttttgtccgtttttcgcaaccctgccctggtggctccaaagctcccgcgcaactccaaaacacagccccaacgttaacaactacgtcaatcgggaaatggctcatcttgttcaagacgtacctgagtggtggcgtcattactgtaggactgtgcgcacggtggattaccacgcggctgactggcaatcagccctcgatgggctagtgcttcgcatcgtcgtccgcccggctacatgccgttaggtacagtgtgggtactccatgtaaacagtatccttttcctcaaagtgtcttcttcattggtggcagacatgtgcaagccataaattctacagtaaccttcggtgttcagcctctaggtaacacactcctatctcctacaagacaagacgcatctcgtgaaaaagctacatgacgttgttgccgctctagaaatgttttttagctctgtagtaatcattagtgcaacaaggcggaatgcctttgcaacattcaacactccgcatacaaaaccagggtagctgaattgggcgagttgacacgttgtatcgacgtggaatataaacgtggatttgatcacaatcaaatgtacgcggaagcgccttcattgatatacctactaaaaggccttaaattcaactcataccccacaaccggactgacactaggatccatgtctttaaatacaatacggatacgggacacacccactattgcgtccgctaaagccagcagtgatctcacacgcaacgaagacagtgtgttgtccgcctccctgcttcgagagccgaatgtgtgatttatgatatgtaaatcgttcttttcgttaagatcaggaaggcgcaactaacagcatagatacggtagtttcatcactcaacccaagccccccccccacatccgacacagggtttaattccgagaacgataggctggtagggtagatttagcgtagcctgtaagcaggacgtcattttgttttgcacccgcagcgcacacaggcgtccccagcatgccggtcgtgacgacaacagcacgctcggttccagcggcacgaagtcgccagcgctcccagcgcacatgcagcggatataatcgcgtcctcgccacacatcaacttctacctactacgcagaccaagctcagctcgtcaaaggggaccggttccgcgatcaagcccaagctcaccggacctaaaatacgtattcatcttcgccctgttctcacctgggatcctggcgcgtgatccagagcatcacgtagcacttcggttttataggccttgacccctcttggcctcatctcgctgttgccgtgtatccacgcgatgtttgtgctgccgtttgtcagctgaattcgaggagagcggttcatttacgcgagccggagatgggtatggcgggttcgtcataagcagcgaagccagctcatatcatgggggggcgcctcgctcagcctcacgagctccacatcgcaagccatcacgcccattccgaggctcagagagcatgcacctttttttccagatacgcgttaggcatgaagcgcgtagcccatgaggcacttgtgcttccgtcgaaattagccgacacatccgctatcgacttttcataagtccccatattggcgcaaggcgtcatcagggttgtagcggtggaaatatcgcttaagattttaaagttttctatccagcacagggagattaacatcttaaacatcttaaagttttctatcccgcacagggggattatcgcttcgccagagtcgtaacatccactctgaatcggactacagcttcatccatcgaaaatctggctgatgacatacaagctggtatggctacaataacagagtcgcgaacggtacgtacctccacggacatctcggatagctgcctactggatacgctacaacctcagcacaaagaagcgcgccaatttcaggcgcttcagctgcggctgcatccgcagattattgctcagggtagcgtgtaagtgatcttaaccgccaaggataaggagttttcagcaaaaacaaaactttagcttactagcgttagcttgactaagcatgttcgttctgatactcctagaatatctaaactcggttgttcaggcaccacaagtcctccattgtgccctggtggcgcgcttcgggacgatgcctggctcatggacaagacgagcccactgtatagaacgatacacatgtagaatagacactccaaaaccttattcatttctgatcatggcaacaacgaggctgccaaaatactggcctatgctggctttaggagggacgaaccagaagcgccacacgtactcgtccagataggactcaggcttctgcttcgtcctcgatgtggtactggaagggggtgcccatgttgatggggctgctgcggctgggagcttgaaggtaagttgtattgtgtgggcttgagcccatgaaactgactggcggatagtgctgggcttttattttaaagtatacaaaacaaaagttaaaatatcttgcaatcggcatatacgcgacagtcgtgggcgtttcatgcagagttgttgcccgcattatgggtacacaactgtgtctgaaatatttcaggagtgtcatttctaaatttgtatctttctaaatagtgggctcgttttactggtgtacgaccatgtagctatcttgtgtgcaggtactttaagtggatgggctattgttgaaagtctctatccacactaaattaaattaaaaatgatagatggggcataattaatggattggcagtacctttccaacgctctctaacgttatctgctcaagctaattcagtaagattaacaagcgatagtggaggaacatattgtagcaagtgcgaaaatgtacccgttttcgttgacaatggcgtcggactctggaaacagggtctgcactttcgctgcagctttagcctcaacgatagaaataagaatgccgcggtgatggcaacaggttgacgccccgtctagcagtgcgcaacctgcgacataaaagttgaaagtcagactcctctgccacacgtgtgctccatagcgactcatggatccgcttttccttagcactggcacccatgatgccagaccagctcgatgcgcaactttgcctctagtggcctcattacaccgacatcaagcggctggcaagcaggtgcgctgtttgcgggtagggggaccacagtagcattagcaacttcagcaacgagccactgcttctcttccgacacatgacactcgaagttgtcgagaaggaggacagcaggcccatcaacttcatattttaacaactttcctacgtaaaaacgccaggtaagagcgtccatccaagcgttttcttggacggtgtagaagtgtccttcagggtactcttcgaactcgcttgtctcgattcgaccgcccagcttgccacgaagcacgaacagagtctgcaacttttcccctataaagtattataaccaaaacaaattagcttaagaaaactaaaattgagagaacaaaaaggacattcctatcagctcgaattgtgagcaccgccgtcatgcgaccggtgtgcttggacgtgttcgcaaacaacgtcctggcaacctctaactgcccacatctgagccggaggcatgtcaaatttgatggccgtttcgtccacgttgtacatggcctccggcccgtacgcggcgtgcgttccacaagtcagcgcaaaaccggcacgcgtttgctctaacacctcgatgcttttcttcgccgtttatggcttctgggaggtaaacccgtggctaaacactcaaataaaggtaaatgttaggaaaaggatgacgctttaacaaaaaaacattttttaccgaattgcgactctctcgacctgcgcgcaagcgccaggacgacgattcgcttattttgcagatagtcttcgacccactctgtctcgattttccaaatgaaggacccaatccggcgtgtcatgagagcctgtagattaaagcataacttttagtggttaaccactacaaattatgagattctgtataaacaaacttaccttctcttcgcgccgcacgtctttcatgaatttaacgaccgcaggaatgttgggaaatagttccctgtggtgctggcccttcagtgacttcgaagtggagtggtcagcgaagtttaaaggcttttcatcttgctttcccgagccatggacagtgccccgaacgagttggagctcgcgggcagccttccccacccctacgtcttcagccaggcggaccgcttcgcgcttctcgcggacggtgtagctctgcttcttcttcttgggcggcggcgtgttgtctatggctcgaaaaacaatgtaagcgactcagcgaccagctccaaaataggcgatggtacccggaaattgaccagagccattcaaaaaataaatcacggtgattgacgaatgtttattgataacatcaatttgattggacaatatgtgtggttgttttgtatgaatatgtctacggaatgacaggttttgcattgccggatttttccatcgttacgcgtgtagctcgtacgagcgagatcatcatcgattataaggagccgagcgcggaccactgacagataaaaagtagtatttgttggagagagtatccccatgacattttttaaaaggcaatcttaccttacaaatccgttctctcgcacgcgtggtagagagtgattacgcgtacgaccgtttcgggagagcaaccagccactcagcaaccatttggttcgtgcgttttccattgaaaatcctcttttctctagagcaaaacatctcggtgtctttcaccttcgtttttttttcttttggcgctggtgtactcgtattgaataactatcattttttggagaacgaaagaaggatagcgaagatcgagatgttgcgctgtgatattaagactctgagggattcgttggggtgctgcggaactacatctttaaatgtgaccggctaaaaatgtatgtacattggaaaaagaaatacgcgggttaaccccaatcaggcacgtagttggaagaacataaaaatggtaggacaaaaccaatttcatttgggtatagaatagtgtaccacaagttttgtcaagcgatccgtctaggacaaaaattgtgttctagagggatcgctttaaaacagaaaggtcaaggaaacttccgtctagaacaaaatttgtgttctaaacagttctagttggaccaaaaacgtcaaggacattttttgtcctcccggtcttagcaaatgggcggctggggctaacggcctgctgtagttcttcttgtatcttgggatcccatgagtggctaatgtatatgttgacaacgaatcaaatagtgttcatatacagggtagcgaaaaaacgtttctacgttaaccaccacgtagtaccgccgtgcacacttcgtgcgtggaggaggaactcttgcctcgtcgaaaaaatattctgacggagtgcagtagcccatagccatactaggagcaaaataaagctctgtatcaacggacgctcggcgatcagcgaaaggttagagctcttccaacactgctaatgtaatctaactgtccagcaaggccgtccacgaaatcatttcaaatttccgagcatttctaacagcagtttgcgtaatcttcacgtagtgctaattgtcgtgtgttaaattaccgcagcggagcctcggcaagtcactgtgcgagtttatcaaatcttattttttttgtttttgagctaaagggaacggtcaattaggggcagctttaatagctgttcatttgcgagcaagatacttgtgatccattggacgcagagaacaacatgcgacagttccgaaaagcccgacgtctcggcttcatttttaggttgtccttggtcatgaaccaatggtattgttctatggatccgtcagcgaatgaaaccacttcgacagcaccgtttaccaattagaggccagattacacttgtgttcagtatactgccgtgctcagggtaactttgattgtaacgggaggttgattgtcaacaagaacatcatggttttacaatctatacggtacgttatgcatttcaaaggagggtagccacttttgaaaacgctgcattccgaaacagacgccgatgcgcacgccgcacaggatggcgcgcggggcgctgacattcttgaagccccacgaccgccgctgccaacaggaccacgatacacggatgcccacatgtgttctggctcgcagctactgcgccgccaccaggaccacgatacatggctacccacgtgttctggcacgcagcgcctgcgccgcctgggcccaagataccttctgtgatgttatatcgacccgtcagggcgggcgtaatgctgcccgattgattagcgccagaaccagcacctgtgggaagcacagttccctctaccaggtccaaggtggcatggctcaggacggtaacatagagtgggagccgtacatactctcatgctctgatgcacggcaggatattcacaggtttaggccgcggtggtcacccaagactagaactcatatcacggtaagcacttcattttgttgaacgccatattcgcgtatgaactagtactaaccatgtgactgcacctgactaactagtgcagcctcgatggtgtcagcgctcaacggagatgacagtagcactcgtggcttctttcacgtggcagaacgcaagttgggcttgcccccttcaccttcctgcggcaccgcgtgggcgcccgccaacagtaacgggcttcctcttctttccagtgctgttgcttggaggttgaggcagcatcaaaacctcttcctacacaacgcccttcatgtgaagccatgcggctagatgcacacccagtggcgccccattgcgcgcgaaagtttccggccgcgcacgcatccttaccagcgatagtagggaacagcacacaagcctggaactctcactggatgttgcggccaacctgtggtcctcgccatgctacacttgctatcttaattgcgtctttcttatcgatgttgcagtagccgtcatctcttcctcaaccagttcgctgatcatgttgcgaatcttgctcttgaggcaggcaaataccgtgacgtccagcggttgaagtagatgagttgcgttcgggggcagggaaactagcaggatgctcagctgcatagctgcatcaacgcccttgtcggagtagtgtgacacacacgcatcaagggccagcacaagcgtacgctggacggtacttggcaccgagctcgcaaagaaatgtagtcattccttgaaaaggtccgtgctcataaatcccgatggcgatgtcgtcacagcagcgccgggcaccacgcagcccttcaatatctggcaccagactggcttgtcgtgcaagatgaacacaggaggcacaacggaaccacttgcacttgtggacgccacgatgttcaggtgggaactggcggtaggttcggtgcaccacccgttactcgatcctcgagcggcaaccacgatcttgctcttgagctgcttctggaacgctgtctcagcaatgtcaaaaacacgtgagggatctagtttcagctcaattacgagcttagctagggtgttgcagagggtggtacggtccgccgggtcgacgcaattgtactccaacgacagcgactgggccaaacgagaggtaagggcagggtagccctccttgaagcgcttatgccaaccctcaccaacaccttcgccacaatcgagtagggtgatctcttgggctttgcgggtgacggcagagtggccgacgggatgccccatgagatgcctgccgacgacccaatcgtagatatggcgctccctgcctagtgggaagtaaagctttggcccgggccgtgcagaagttagaggccggcccgctgctgtcgtcataccgaggttttaggcttgaatttcaacagccgcaaccgcctcagccgaacacggcagccaacgaagagtgctgccatttatcatcaggatgtttttttctcatgtgaggggcattgtagctgttgccaccaccagcaaacattgtgcctcaagtacactttgaagcgtaaggaagcacttgttggtggtggcacttgtcatctcctcgagagcggcattcacagccgcgatgatcccgtcgacgtcccgcgtttacttcttgttctgcgggcggctgcatcgagcagaaccagcccaagtcgagcccattaaccctttcactaccagagatttttagtaggtccactccggacccatatgacagccagtcgccttgcagtcgccttaataaattaaccaatagtgaatcattttgcttccacgtggaacttatttttgcccgcggagtaactcacggtagtgcattatacctgaatttccgatttagcgagatgaccgccgctcctagtgctatacttctactgaaacatacgatgtgcaaatggggcggtttttatcgacaacaggatcgaatgctgtcaagccgttgtacgcctcgctcgagggcaatttaccagcttatctaccactatagtactatgcaagaatagagaggtttcgcgcgcggcttccatcacctttaccctcaaaaagctgtttaaaacatgcaaaaaacctatccaccgtctagaaaatctggtggaagtcgcatatgtagtggctttctccaccaccctcagcctccatccatccactgccaacacgcttgtcagcgcccgagtagcgtcacttttgcttcggcaatggcagaaccaaccaagcgcaagaaaatcaccgaagaggaagatgtcatgcttttaaagcagacactcgcggacgagccctaccagcaggagcatggcaaggtgatggagcactgggagaagttggcacaaacattggtggcttgtgccgacttctcacgtaagaatctcagcgaaaacggcccagaaccgcgttaacgcgcttatcggtaagcaaatcgtctcctctttaacccctctagcccatattctgtatcctacagaataagcatttcgacaggtttaatatccggcaaacctggtttccgcgaaaaacttcgcatataggtttttgtatagtgattaatcagcccatcattcctgttggatctgtgatgagtagatagacggggattcttctgcggctatagaaggacgagtataaatccccaacaggttggaaaattggggtgtaaggccaaagtgaccgtttggcagccactcgcggtgcctgtcacttcggaacaaaaaaccgccctgaccagacgtacctcgagctctgcaagcctggtaagaacgtgctagtgctgctgcgtaggcgagggccaggcgctactgggagctcgaggtcgccataacagtctactcgtagtagtgatgctaaaggtaagcaagtctatttacagtctgttcgatatattgtctaaggtaagtctggaattgtattcaagcgcacgcgagcccatagtgcgccgtgcgaggcggtgctgccggctactactaagtatcgagacgcgcgttcgtcactcctggaccagccacctccatgaatgtatccgcagcggtagcaacggcttcaactagcgctccacagcagcgcatgcgtcgttcaggcgcttaccaggtagggggtaaacggccgatggagacgatgcgatagaggggctagatggaagctgcagaccaacgtgtattgactgaatttattgtgatggtacctacagaatagaccagtccggcaacgatggatatgagggatgctacagatcaaaccagaccaacccaagtggatacagcagaaggtacagaacaaggctttgtgctgatttgaatacgacggatgctacagagtaaggcggccgtgagacggagtctactgaacaagggacttctagcaaacgcttcgacgtacacggcgcgaagcctggggtgaccaccgagagcgtttggcccgcatgctgctgtatatttaggatgtagcagagcttatcgataatgcattcgtatattacatcttatggatactgtgcgtgcgacggacatgagcgaacgccatagcgcgataaagtgatcaccagcgctagttagcaagacaatggcaaggattcgtagggagcgaatagatgcgtacacgaagtctatcggtggtctagcgacgctaggaaataattgcccagttcctcctcactccgttagttaggaacggggcatttttttcctcagcgcctgggcctcacccgccgcgtggcatgaaggacggatggctggtgctattaacgctcctcggttcggactcataccgaacttgacaggtattgccgttctaaaggtactaacgtgtgtgttacgtttgtttcgcccaatgagcacacacgatttttaccagatggtggatacattgctcatcttttgtccactttcgcacctattttgtgctggaagtgcacaattgatgtaccgtcaccctgtaaagagttgcaatagcatacctccagcagttttgacgtatactctaatcaagtcatcttattctgtataatcgctacagaataaggttggggctagaagggttaagtaacatatattgctaacaattctgaatttgtaaaattattatgtagctgctgctaagaagaaggatggcactgccaagcggctttccggtgttacggagacgcacagcgagaaggacgagctccttgacgagctgatcttaaggctggaggagtgcaaggcagagaaggaggctaagaggaagatgaaggccgacaaggatgctccgagcgagagtgcaggtgaagccatcaggcgtctcgctgttgagaggttgaaacgctcacgagaagacgatgctgtggatgtacctcaagagcgagcaaattcgcgaagcttgccgatatcctacaagctcaaaagagcaggagtttgtcatgcgaagggaacagtgggaacaagagcgccaagatcgccgcgacattgagaaacgcttcattctcttactcgagcatttagctaacaaaaagtaaatagaactgtggttggttcatgcttttattttgtgttaattggttatgtctaagtagtcctcaaggggcgggggaggtaagtcaaagaactgactaatttgattgccgccattataacagcagtgacaatttgtcagtagtatggcaacccgcacaaattcacctaccagactgagccgaacctttagatttttcctgtaatcaatgaaagcccaaagactttgcatgatcccgaatcccattctactgcggtcctcactgcactcatttccttgttgaagattcgcgcatgcgttgaaagcactacgtccttaaagcgggtaacgacgaactcgctcactgaatacgcagggtcgccaaatatggctttaccttcgaatgcatctgcattctcgcgaaagtattgcaggaggcagctagcagcaagcacagtcttgtcgtgtctacgcccttcaaaaggcccgaaaaaatgcatgcatagtccgtcgggggtcgtcaatcctaatacagttatcataatacaattagtcaaagccaatatcgtagtcgttgaagctcaaattatattacctgaaagatgagacagtgtaatctcttatggccgctgtagacttgacgctgtagattctccgaccgatggcccttgcgaggagaaggacggtaaatgccgatcttcgttccgtctagaagtgcgaagacgctaggcacagaggtacggcgctctatagtttcacaataggcgcctatttgtctgcgaacatgatcaagatgaaagtacatgcgctcgctataccttgcgtctacgtagtcaactaaagcacaacgccgtttgcaagttaacaaaacccacccacttcgtgttaaatcaatacgtactcatccacaggaaaatgcggctaagtgcaggtcttcatcggccgaaggtgcgagccatgtcgtgtagtcggcgaggataactgagccggtagggcatgactgctgcagcttcttcggcatgacaacgatcgttgctgtccgtcacaacgacagcagggagcgggaataggcgcactagtagccgaacaccacgcacgtcaaaccgaaagtccagcacggagttaatgtccgcgtaggtgccaaggttgaaccgcacatcaggaattagtggtcgctctgggacatcaaagaacccagcctgtagaagggctagccacaacgcctcttcaccaaacgaggctagcagcgctagcagctccagcgcttcgtcctgggtgaacggcatcgccgccgcttacttgcttgcttgcgtgtgcttgcttggcctttacgcattggcatattattggctgtgggatgggtggtacactagtggtacgcgggtaaggaaaatggggcgaaacctctgttgggcatagccattaccttcacatttatgacctgctctaaaggaaaagtgaaggtgaaaaattgtacaaaacctctctaatgtctgcatttgtaagttgacgcgtatctatattccgctgtgtgtgtaggcgaaggtagcgcgactgaataatatagccaggtactacgactgcattgatactgtgcatacttgacagtacatatagctctcctatgctgtgcgtattcgttttgatcgtcgacatcggcgtgcgctacgtgtacatgtagataatggcgctaaggttgcatcaaggggtggatcaattagtggctggatcatgagtacggcgagcttgtaacaatggcaagctcaccagtacagctcgctgttcaaccctgtcaagctaggtagaacctgctgagataaagataattggtgtatttacgccttcagttacataccattgatggtattgatgatatggcattgtggctaagaggctggttgccagctttactcggcttgtcagacgctaactactggcaggactccggcatcgatccgactctttacactgatacctgttgcagccgttctacgtgttggcttatctgggattttagtaagatagtctactaatagcgccgttgtgcgacgtctttcttgctattagatgcagctttccctatacttcttaccagctcgggttcatttttatcgcctaacggagccaccacgtagcatcccgagctttcatggcagccattagccactatttgtgagaatgcttccacaagcagtaacaactagccgacatgtagtgtacgcactattgcaacctaagatgtaagcttagaataggtacgagctactcgttcttcccgcttatttgttgcgcgcggcaccaggtgaatgtggcacgctgctcattgccgccgctggtttcgtggagaaagcgccgatagcatttgagcacacgcttctcgaacaactccacgtcgtaagtgatggcctcatgcccgagatagaatggcacacgcgaggcgctcggatgccatggagtactatgaatatgtgaatactctggcgtgtatgacgcccgtgcatctatttcatgttagcacaaagacttcgtgtcaatgtgaaatttcaagtatgcttgctcccaaactaatctggcgctcacgatactgcgcgaattagaggtccgcagcggtcctactaatcttggtgagcaacattcccgaaacccttcgacgtatttttatccaatcaacagtacatgtacctgctctaataggaccgctacggacctattcatgcatcaggctgggctggtagtgaaagggttaaagccagggcttcacggtggctggctggcggagaacttaatcgaccggcctcccgatgcagccgcaagtttcgctgccgtcctgtccgaggcatggtgagggcggtgtcctgctgtacgatcacatctcccttacctatacacaaaaatattcataataaataataggggttgtcaatgctagcagcaactagtcgctttttttctgcgcaaatcgggcaaaaatattttaagccaatcgctgagagcggccattaactaccccgtttagcccgcgcagcagcaagtgcagattttctgcgcgggtcgatcgaaatgcccatgtccaagggcacggcaagccgtcttcgcagacagaaggcacccttcgaccttggatgcgaagggatcgctctaccggtgcctttttgttaacctgaggcgctggttaagacgacccttcaccgttgccagcagaaaaaaaaagttgttgctgctgcgggccgcttgcgcgactttttgttccgttagcgagaattttttccagccaatcacaggccgggaaaaatcagccgacttgcgcagaaaaaaagcgacttgttgctgccagcattgacaacccctattagtgagcacaacacattacaagatatgttgcaaaaacatgatctggccaaactcgcttacaagcggcgattacgtgctgcgtcagcaagagctcctagacatccttcgtcatcttaacgggggtcgtgaccggagtccccttcagccggttctttctgctgtggacagccaacttggtctccacccctttatccatctgtatctacagttttgagtttaaccggggtcaggtaagcagtcgtcggaaggagtaggcaaccataagcatggtggagttgcgcttctcgcgcttgctgcaggacgtggcgccccgcagcgcgccgcccggcaaagctgtggtcgaacctctcgatggcacgaccaccgggtcggacgacgaggaagcaacaaaaacatgattttagtcgtgcttcagaaagcgtgtcgagactacgaatatctatcacatgcactgtctggttaacgggtgcccttggtgcgcccgcacccgcaacaaaccgtccgcccgccaaccctgattcgcagacgacagctgcaatgtgctcgtcgaaagtactcggtgcgaacaagatgcttagtgatgtattgttgttgacgaagccaacctggcgttgggtcaaagtccgaccaagtcatgctggatcgagccgctagcatcaagagagaatttcacttaaattaaatgcaagaatggcgcgtagacgacaattgaaacgataactatgtcgtatatgtacattaactttttctgtgataacatagcgtcacatcaattccaaagacgtttggttccccatataccattttcaaaggatagcacactacaaaagcagcgttgttatggccgcggatttatatatagcataattattgtatatataagaatatattctgagttttttttctttttgcagattaattttataattattacgcatatagcagcggatgtattggtgaggcggattcagttcaagtggcattaaaatccggacgttcgctgtcatgcccgtcgccatcaccgctaagttcttgtccgcgcccagccgtgcgacggccttattctccacagtttgtccagttcgcaagccgtgccaaaaccaagggggtatgtcacgcaggtgtttgaggaccaaaacatagttgccgccattaagttagtgccagcccatatttttacctgtaaatccgatccgattttaccgttttgtgtgggcatttatcctggtgggaggaggacgtcgagggggggggggggctcagcgacccaggttgtacaggatgccaatcgtatacagctttccgaagccgcaccattgagaatgaacaacacattctaagaactataggctgtaacgtattctacaccgaccggttaccaccagcgagtcagctacctagcatgtcgcgcgtgtcgaccgctaaaacgttggtataaatcggtgtagcatacgccctatctcattagggatgcaggcatccattcatgaactgcgtcacgatttcctgggtgtgtaaagttgaaaggcagctagtcacccaggctgcgttaagtgtatggtttacacatcaacaattctactgcatagtttaagtaagtgtacagcggctaaaatcaactcgataaccccaagggatgggtttatttactcagtttccaaaccaaccatcgttatgaacacactcaagtcgttgattgcatgttgccgatagctggtggtaggtcccgtatgcatcggtagacttagcgcgcatcctgtgctttacctcgggctttcccgccaaagtggcctcaggagtacacagaatgggtacatttacaaatatagtgacatgtatttcgcttagacttaacggctactctgttcctacagatgctgtccactacaacaaacgatgagactaagaagtactacagaagcaccggcagagaaaaaccctgaagaaggttggtcgagtgggcaggctcgacgtcggacacaatagctcatgtcgaacgtggtgcaaagtgttaaggaccgggacttcatgctcgccggtatcgcccacgcggacaagaagaccaagcacggccgccacatgacctaccacacggacccccccgaacgacgtgcggctggggaaaatatcctacctggtgtcctatcaagtgctgtttcctgatgctgcaaacaagatccacatcccgaatcggcgcggcaatggagagcacaccgagaatacgaccatctccaaggccggcagtacgtccgcagagctgtccccaagccgcttcacgacggtgatccgcggaacgagcggctacgcggtgattttgcctgccaggattccgctcagggtcgagtatacaggtgaaggttgcccggattacgacacgccctcgacgttcgagaagcgcgtgcagaagaagatgaagaagttttctctgggggcgtcgtacaatggctcggaactcacggaactgttctattgcgacggaccggtcaccgacgacagtccaccggccaagattttcctggacgagttcatcgagtacaaggcggagtagcggcttgctgtgttctcggtgttcggcctcaagcacgcgcgcaatgcagccttggctcaagccagcgcgtcttcgcaagatccgccgcccgcatctgcgtgcgagtctccagtagctgtctccagttctccagttgtgtcagtacctgccgagtctgctgcccaagccgatttagaggagccccgctcggtgacacttcaacgacgccgacctcccccccccaagttccccaagtggaccatcacaagaagaagatgctgcgactcctataggcctggtaacttcacgttcgacggagcgtgaccaattttctgtcgctgacacggagtaccaactattttcagtgggctgcgtggtgaagttgacactgctttcggcggcatcaatgcatttgttgcgctgttatacgatcggcaagcatgcttgatacatgcctgtgacgccgatttggtctacgcgaagaaaaaggttagctcgatcgaggagccaggtcaaacgcgaaccaccaagatcgaagagcagacgacaaagattgatgagcagacagcgaagatcgaagagcagagcaggttgattcacgcgatgatcgacgaagttcagcagctacgagaaaaatgagttctgagcaaaattgttctcttacgatgttgcacctctctgtgttgttgcagtatgtacatcatgccacgactacgggataactttagattgaattcgtctctgatgaggtttgagaacaactttagctttgccaaataatgttcaagattgtgctacgttctaaaagaatatgaatgtcaccatatctgttatatctaaatttcataaattgattgaatgaatcaaaacggtatatccctagttggattacaaattttgcgattgttagcttaacaacccgggtatgcgtcaagtacaccggaaaaagcagatttgtggggggttactcaagaataatagatgcgctatacaaaattaggaagatcggaaaggtctaagggaaagaaaggaacttgaaagcacgcttggattcaattggggttcttagtttgttttatcggcttggaaatctcctcccaaactttgcccctatgaccccctcccctccgcatgtattcgcatttagttggttttcaaccaatcaaaagtgccgatgcaatgataactgaaaatgatggtggtatcttatcgtttgttttgtatggacctcctaagacgcaatgccatttttcgaaaaaaagcggcatcattgcacgttctcgaaaatgggcacaatgttgtactcgtggagctgctgtgctctactgtttggtcgttcaggaatgctagcgcttgatatacattgtaaagttatgttctacatgttgtaaacgtccgcaatgcattcattgttcagcggatcttttatttactaaaaggtcaatcatgtcccatttgagcggtgtacttgaggcagatccggttgttaaaagtgatatttttaattacaccatttccctagtaagctgtgccatgactatacaccgtgtacgtcttgaagagtgagtcaccctgttttgacttttagttttctggggaaccatttgtatttactaaattcaaaatatatagcacgcaattcgtactaccgcgatctacccgaatccggtctcatttctcaataaggtgaaattgaaaatctgttttgaaaccggtggaatgattatcaaagatgcacgactatttttagggtgaagggtgtaccgtttttgagagctgtcacttcagaccactgcttattgaagttgtagcgttgtacattggttttagcccctttcgtgcaaaatatggtcatattctgctcgttttgcacgtttgctacggtataaataggagatctgtctgcggtgggagttttcatatacgatattaaattctattaagctctaattagatagaaagataacgtaaaatacgtattacactagcaagtgaagcagctggcgacgacccgggtcagcaaaagaacccggggctcgcaaatcctatcatcacgcatgattagtgggatgaagttgcacaggtatccagcagtcctaccaacattggataatgttatggttgttgtagatagttctactacctaagtcaacacaacactgcctctagatattcttgttcaacacaattgaataagttttaacaaaaaaatactagttgaccatagttgtgttccccaggccaaataaaataattaaacacaaatatccatctttttgtttgcgggaccagtgtcgtcgccaatcgtttagagtgctaattttccacatgcaaattccgcactgcgaattctgcaagacactaaaattgcatgttctgtgagcgtaaggcgcactaacgctcacaatacaatgctcaagttgcagaggcgtgcgaaagctggagaagggtactacggttcaaacagtggggtcgaaagttgattaatttatctttgcttacctaaacgacctcgaagcaaaacgttggcgatcgtgcgtacgctttagctcgtttttcttgttactttttgtcttaaacaaaactagtttgttttgggaaacacgatatttcaaaattatacaatagtattaaaaatatgaatttgtatatgtatgtttttattttatcttcgtttttatcatagtgtagtgtattgttagcattggcgtcttaagcttaggaagtcgaaatcttaggccgtgttcgagatggcacccaaatagtagttttgtacacatttggcgcagcaaatagccgctttgagtatttcgcggtttttttatagctcagttttagagaaacctcaagtgctttgaaatcgctgtatttgaaatttagggtagagctgttttccacgaagcagctatttcactcggagctgttaagaaagcagattattggaaatggctgctttatgtgaaatagctcgatatgcgctaatttaactcgaactcggccttagatatatctaaaaacaaatattgtgcctcgcacacattttgccatcctgatttaagcgtcaaattgaaatggctcatcaaataaaaatactgtaaaaacatgccagcacccataaatcgatccttctagaagtgctcaggaggctgatcggtgcatacacatattcagcaagcaacagatagtgtacatgtatcggatgtggaaatgccaatcaaaaatggcattccaagctatctggcgctagatcgaaaaatggcattccaagctatctggcgctagatcgaagctgcgccaacaaatcagggctgatgcatggatcatgtgctcgtttcaaaaataaaacgatctcactttatattaaatcgaggaaacctacgtgggaacggacatttttggtgcaaggcacaatacaatttccggattaataattatcgttgtattgtgaaaaccgattagtttgtcctgctgaattagccggttaaacattgctcatagcggatttgaagactaatgaatcggggatgtctcaattataatcggagtataaatcgctcatcggtctcataattgtgtgcagtctagcaatttcgatcaacatgcatgtaccctcggcccgagactcgccaagtgcagcgacaacaccgcgcttaaacgcgtcacctgcatatctcagttacatgtattatagcgtgcggcttttcctgcttagttatgatgttagtgttgtagccttgactaccttgccaagagtgaatgcaacgattgttgtctggcggctgatttagcctacaaggagcgaatgccggttgcacatcggacattccatctgaatagcaagcaaatcggccggctctggcttaatcggccgattagcaaatgtaaatcggactcatatgctatgactctgtaagtcgttctaggtaccggtagtaatattgagtataaatcgaggtaccccagtctaattaggaggtcggatttatcaaatcgggggtcgtcagccttattaagccactaaatcgtcggattaacaatccaataagacattctaatcggttttcacaatatcatgtagatcaaaaatgtttatgactaagttggctacacaaacttatatgtactgattttagatagtttgttttgctattttagcaagtgttgtgtggctcacttcaagaagaccttcactcacactcatctccggacggggtgaaagggctgtccgcggcgcgactccgcgtgattaaacgcaacctggttctcgtcttcgagtagattatttaatatatatcatgcagctacctttatgagaatgccacagctccataactttgtgcggtggctttgagcccccgcgttgcctttagcaatgcgttcatgacattcgtccgtttgactgtacaaactggtgatattaattttcgaaggttttctcttggtggaggagtgaaggacgtcgaaggggggcgaatgtttgcggaaagttgccttcatttacagacttacgcccatcaaggtgaccgcagctcctgtcgccctatacgacgcccctgcacgcccgcgacagacccaagctcacgcataccgtgctcctgctgacaagaggagtcgatccatcctagttacgctccttgaaacgccacagccgagcccgcaagagaattaatccaggagatctatcccacgagccatgagtagcaccgtcgcggcctcctcgttgaccaccgcgacgtccgtcaccagtgatagtgccatgccgcccagcaagcgccagaaactgagcgaggacgacgtcgttaagccagagcccgactcgaaggacggcgtcctggccgcgtcgcacacggaggacgctggagagaacgcgcagaagaacgacgcggcctccagtgcagccgcggccagcggcctcccgccgagtgtggcgctgagcctccagaaggacccgtcctggatgctgggcgacgtcgacagcttcggcggcctcggccccattccgtcgatgaacgcggtgctggagaagcgcacgtcgagtcagttctccatcagctcgctactgccgtcgtccgtaagcacgtcaaccaccggcatccagagcacggcggctgaggctgcacgcactgaggtagatagcggagaggcgaccacagataacgagggtcaaggatctgcagtctcggctactaccgctacgactgccagtgcggtggtgccgacgctggccgaaggatcgggcggtaacaccaagtacatggacccgaacacgggcgactacatgtacccagagaacgtgaagcccatgagcttctatgacaagcagcgcctcgtgcagaagatcacgatgctgcccagccagtacttgcgcggacttatggacgtgatcagcaagtaccagcccgacactgtgcgacagatcgacgacgacggctacgcctttgatctgggccagatgaacgagaacaccgtgtgggccatcagcgactacgtcaaggactcgatgatcgagctggatgggtacatcaagtccctcaaccaaacagggatcagtctctccacagacgaggatcggcaatcggaaggcactgtactgacggccacaagtgcggcctcgagcagtagtcccagcagcacagtccgccacctaaccaacacactggcgatgaacacgtccaagatgtcggccatcacgaacaacgaaaaccagaacaagttcctggagcaggtggagatgtactcgaagcccaaggtgaccaagtcgcgcgtaaagcccagcaagaagcacgagtgccccacgtgcaacaagcagtttcgcgggcgctccgagcttcagaaccacatccggacacacactggcgagaagccgctcaagtgctcgtacgccggctgcaccaagcggtacgcgcacagctcaaacctgcgcgcccacgagcgcacccacgcgggcatcaagccctacacatgtcactacgacggctgcggcaagagcttcgcgcactcggtgtccttgaaggagcacatctggatgcacgcaggcttccagccctacgtgtgtccgtacgagggctgccagaagaagttcacacaggtctcgaattttgcacgacacaagaagacccacgagaaggaggagcgcagcgagaacgaacactctgtggagagtgataactaggtcgcacacacatacacgcgcagccccagtctatggatacgaggcccgaagcggccgatagttgataaataagcttgaagcacttggaacacttggttccaccttgttggattaaaaaaaactctgtctcgttgcctcgctctctaactgattcactcgccgtcggcctggcccctcggcttggacaccacgagcgtgcgctcccgcccgccggtctcgaacttggcgatcagcagcgagcgcctgctcgtctccagccgtacggtcggcagcggctggtcctcctcgggctcgggcgcgtcgtcgtcctcacccccttccttcgcgaactggcccaggtcgatggccttctcggcgatgcacgtgaagaagccgttcttctggtcgcgcgccgtgtacgcgaggtcgccctgcgcattgagcagcagcccgtggccgtcgttgagcacgagccccagcggcgcctccatcgtcgtcgtcactcgggtgggcactaaactggcaagattctggcggcctgcttttaacactcgcagtcgacggttctcaggcgtacactttagtggcatgtaaaggttttccaacatcttcctgctcttaaaaccgatgtggtcggttttactgtcgctgtataactgtacgctcttcatctggtggggttgaagggatgtgttctttccgagaagaagctcaattacgcatctgcgatgaagtctcccacccgaccgacgcgtcgcgccagcgcgcgtacctctcgccgtcgtggctccggcgacgcgccgacagcccagccttctccgcctgatgccggcgtgctgattgagccgtcgacggaccccgagggctcgctggaagtgacgttctgcgccgtgcagcgcgtggccggccgcgcgttcctgttgctgtgcacgcactcacattggcgcctctaccgcctggacggcttcagtgcggctcgtgatagctgcacgaccgtgcaggtgagtttgcggcgcgtcgaactgtggcctccctgccgcgatagggcgcgaaatgcattactcaacctaacgacacgctgtggaacgctcttgtgcttgtttctagctgctgatcgacccgcagaaggacgcggcgcgactttcaggtgtgcgcttcttccgcctgtacgagcggccggcaacggcggcttctcgtggcttcgcgctggctctgggcgggctcttcgtgtcggagcgaagcttctcgacgccctcgagcgacgaggaggacgaggactttgtggctgcatcggcagagaatgaagacgacggacacgaggacatttccgtgctggctctggacgaggagaaactgctgcacaagctgccgccgtcgccgtcgctggtgctggacgtgcagaccaacgctgcgacggccgcagtgctctgcgagacgcgcgagcttttcctgtacgacttggccactttccagctattgcagacaattgtcacggcctctccagccatggcgctcggtgcgcgctggctggcgtacccaggatacgctcaggatgtacccggacttcaagccaacggacgcgatcactcgctgtcgggccaaggagatagcgattcggacttcgacgacctccctactgacgtcctggtgaacggcggggtggcagtggaggcatcacacagctcgtcgccgtcgtacacggcaatcgacgtggcgcagaatgtggcctcggggctgtattatctttcggaagtcggacgcgccacgatcgctccgtacttgtcctcctcgcccggccaactggccgatggagcgcacaatcttcgcacacgggcatcgccttctggacggcgtagttccggtcgatctcgaaagtcttccctaaatgacccctcgggtgcccaacagcagaatccccagtctagagacgacatcactgcctcagcctcgaagaagcacccggggtgggtcgtggtattggatctggttactaagcgcgtggtggccaacttcccgtgccactcgacagcattggttaacttgtcgatggacttttcggggctactgctggcaacaagctccactaagggccagaacctccatgtgtacagattgtcgccgccgttgcaaagtgtcgtaaacaaaccggccggggcaggagctgctggtcacggatcgcttcaccaccaactggtgtacaagttgcagcgtgggatcactcacgccagtatccaggacatcgccttcagccaggatggcaagtggattaatgtcacgtcagcacacggcaccagccacctctatgctttgcacccggagggagtgcgcgtgagtgcagacacccatgcaaacacggtcgagagtgcgaccgaatccgacgttgatggccttggcccaggcttccggcatcgcgaggtgaacgacttctatgctgatttccgctctcttgagacgcggacgcagacacaggtgcttcgaattcgccatgaactgcaaacccccgctgtatcagtcgtggcgccgcacaaggcagcagccagccctgcgtcttcgaaagcgcgtacgacgcgttcgtcatcgtcgtcgtcttcttcgtctatgtcgtctacatcgtcgtcgtcatccccacccggttatgcgtatcaccacagcccgccaacaactggaagtatgcgtagcagcactatcatggagtcggccctggatgcgtcgcaagcgttgctatctcaactcgccacatccgccatagactttggtcatcaacacttcgaaaatgacacggatgtagttgctcgccgccgccgactgcgtcagcgattgtgctgcctgttcgctgccgatggactaaaggtgctgatctgctgcgactcggcgctgaagttgtacggaatgcgagtgactgcgctttcccaacataaagcagaccacgcgcgtgctgcgtcgactgatccgaagacgaagaattccaagtcgtcgttgtcgtcgttcggcttcgaggccagcgtcacggagctcaagtcgtgggacctgctcgcatcaaaccgacggaagtcggaatctctctcgtctgcggttgaagatctggcaagcgtgaatggcagcagcaccggccctgaagccagcgctaaaagcgagctgagaacctatgcccagcgatcattaccgttgtgggcccacccgaaagtgacgttcaaggcgatcgacgaagaccacccggagggcagaactcttgaagttaaacgcaaggggccaaatccgagccaagatctcagctctagcaccatggccatggcaccggagggcttcgtcaacggcgacgagcaactgtttgtgatggagatggattcctacttcggtattgggggctcgccagtgttcgacggacgcggtggagatcactccgcaacgccagaggtgccgccacctttagatctagcagcgagcatcaacatggccatgtcatcttcactgtcagaaacgccgccgaagccgcttccagaggtgaagaacacgatttgcttcagaccaatcgaccagaactctccccctcaaacaaacggatcaagccacaagggcaagaagaaaaaaggaaagaaccgccgagcgccaacgccaccgtcgtcttcagaaaccgaagttgaagtcatcgaagagggcagcactactggcgggctggcatcgttgcagttcacgatgcaggacatgtactttgcggtgcctcctaccgacgaagccagcgactaacaagcgtgcatatggatgctgacctcacacatacccaaaaaccactttacacgtcaacaacaaccaacaccttacaaaggcgtccaaaaaattgaagtatacatcaccacaaagaaagaaacccaagaggtcaagtaaagccaatgacaagtacattaggatctggtccactacacatagcgtcgctcctgcaaagctccggagctgtctacttgtctgcgggcgggagttccagaccattttccttgggctgcagcatgagctctacaatctgctctacctgcttcctcaactccaaagtcacttcctcacgcgtttggcccacacggccggccagctccacgtagtacttaagcttaggctccgtaccgctggtgcgaagcgtggcgacgcagccgttggcgaaagtgtacgtgatcatctcggtcgagctgctcacggggagcacagcgcgcttgtcgggctgagaactgtcgtagcccgtagtgaggtcccgcacgtgggtgatagcgaagtcgccacagctctcccagtacttgccattgttgcgtagacgctcgaagatggcacggatcttgaccgggtcgtagcacttggcgtagtggttctgcgtcacaaagtggccgtagcgctcataaagctcattgaggtgctggcccaccgtcatttgcttggtggcttcgagctgcacggccatctcggcgaacacagcagcggcgacaacgccgtccttgtccttgaccagatcaccaacgcagaagccgattgcctcctcgaacgagaacagcacggtcttgcctgcctcgcggagctcagcagtcttgttccccatccacttgaagccggtgagagtctcctcgaagttgaggccctcggtctgtgcgaccgcacgcagcatcttggacgagacagtcgatgcgatgaagtagagctgcttacggtcgcagttcgggtgcagtcgcaggtactgctcaagttcccagtagccgagcaggacgccgatctcgttgcccgtgaagatgcgccagcctgactgggagctcgggtcgcgctcagcaactgcaagacgatcagcatcggggtcgttggccaggatcagccttgctccgttggcctcggcggtctccatggcgagttgcagtgcacccttgccctcctccggattggggaaggccaccgtggggaactcggggtcaggaaggagctgcgcctgcacagggacgtactccttgtgaccgaaagctgcgaaggagcggcttgtgaacgcgtggccgacaccgtgcatggctgtataggcaatcttgagcgtcgtgttggtgttggcctccgggaagcggcacagtccggcacgcgggcgctcaaagtagagcttcgtgagctcctccttggggttctcgatcagcgtcgggaatgatttcttcagcgactccagcgagtcgtacagtctccatggagccaggttggtcatgatctcgtttgcgatgccctcgtcgtggggcgggatgatctggctgccgttgctccagtacaccttgtatccgttgtccgccttggggttgtgcgaggccgtgaccattacgcccgccgcgcatcccttctgctcaatgcagaacggctacaacaacgccaacaaaagcaacagcagtggtcagacacgataataccatccacaaacacaagaaagcactggtgtactcaccaccagcggcgtggccacgaagccctcgtagaggtaaaccttgatgccgtagtgcgcgcagactgcggccgtgagctccgcaaacctcttggagctgagcgagccctgctcgcggtggtcgtagcccaccgcgacgcccatggacttggcgcggtctccgaactgcttggtcaggtacttgcagatgccctgcgaggcctggatcaccaccagatcgttcatggcggcggggccggggcccatcacggcgcgcaggccggcggtgccgaaggccacgcgactgccgaacagctcgcggatgcgcgccacgtccttggcctccacgagctgctgcacttgcgccttggtgccggcgttcacgtcccagtccgcccactgctgggcctccgccagccactgctcgtccgtgcgcgcgctcattgcgataagcttaggtactcaacttgacttggtctttgtctgcaaatggtaaagtgatccgatccccaagctgcgtcaggtgaaggttagcattcacatggatgcttgaccgttttttatacttgaggtttgtatagaaatgaaggggcatgtcacagtgcggtacacgcattaactttgccatacaatgtacataaggccaagtagggcaaagttgtagggttatttgctgcacttcaactttgcatgttggttgtcttcaatctcaggcgcgttcttaagttcccgggagcagttttttaagcctggggctgagctatactctactgtattgcttacgtatgtggctactactactacagatgtactacgatgcagggtataccgactcgatctgggtgcgctgttgggtggaagggggtcctacgaggagaactcccccgtgactgccttgctcaaccagtccaggccctcgtagattccgtcgccagtcgtcgcaacgcaagcctgcacatgcgtagggttcttggtggcctccgtcaactccattctctcacggagctcgtcggccgacagggcgttggactggtcctgcttgttggcgtacaccagcagcttcgtgttggcgagctcctctgcctcgaagatcaggtgcagcgcctgcttcgcctcgtcgatccgctcgaagtcggcggcgtcaaccacgaagatgacggcgtcgttgttgcacagatagtgcttccagagcgagcgaatcttctcctggcccccgatgtcccaggccgtgaacttgatgttcttgtactcgaaggtctcgacgttgaagccgatggtggggatggtggtcaccaactcgcccagcttgatcttgtagagcagcgtggtcttgccggccgcgtccaggccgatgatcatgatgcgactctcgcggttgccaaagtatgaggccaggctgccgtagagagcttcaagcgagaaggagaagaggttgcccatggctggagggtgagggggcggatgctgctgtgggctttggtggcgagttggaaagtgaatagcgccgaggacagctttgacccgcaatgggatcctgcggcaacactatttgaagcctcgctgagtgacggtcatcgaagttgctgttttgaagtggagcctccggattggaggaaaagccggatgtccaatcaagcggtgagaatcccagaaagttcggtccacttcaacttgctttcttccagcggaaaagtctccgctagacggcggcaccaagatcgttgatcacccgtcgcactcccaggctcgggcagcaagggtgcgtggatcatcaagttgtgcgtggtgttcaagcaacaccgagtcaaaacggtgctatgctacgaggcgaatgtagtttctatatctaagacggagacatccgcatcgtgatcgcctcttaacgcccaccggacgtcacaatgttatcgaggtggattaacggggaatgaacgagcaacagtcctgagagtgtgcatgtgcactttactgggccgtagtgtcagctggccaagagtatttctacttggctgctacatgcatgtaactagagctgacgcgagcacaacgcacacacatcagcgcgcttcgaaaagcctgcactaaccgcgtcttcatccattaagttacaagtcctgccggcattcgccacgcatgtattagttggcggcgacgccgctctgctgctgctctcgctgctgctgcttcttgcgctgcagctgcagcttcctcttgaggttcttggccttcttcttggccgcctcctcgcgcagcttgtccagcagctcgtcctgcgccgtgcgcttgcgcttcttgtcgaccttggaggcctgcgtcttgaggcgcacgagctccagctcctcctcgtcctgcgcctcgtcgcgctcgcgctcggcctcctgctcggccttggccgcctcctccgcgcgactgccgcgcggcttgcgcagcagtttgcgcttcatctcgcgctcttgctccgtcagcgtcgcgtcctgctggttggcgcccggccgcgtgaggctcggcagactcttgccgccattgctgccactggacgacggacggtagagcgtcacggggcggcgctgctgcgtctgcgactgctgctccgcctcgtccttgtcgtcggcggcgtcgcccccgcccagcagccaggagcccaccaggtccagcgcgttcgactggaacgccacgccttcgtcgtcgctgttgcccattgagttgtgttgccttgtgccgcttgatgggcgtcagtcaaatgcacccctcgactaagtccgcaccaaataagcccattctattggcgcaaattcggggattaaatatcgtaatttcagctaatcgagggtcggtaccagcccgcccgttggttggctggggcgtctgcggcgttggcgccagcttgcgggcggcgctcactctttgatctcctctccagcaagtcaagtcaaagccactctccagtcaccatgggccgtatgcactctcgcggaaagggcatgagcaagtctgctcgcccgtacaagcgctcgccgccctcgtggctcaaggtctcggccgaggacgtggaggaccacatctgcaagttcgccaagaagggcctgaccccgtcgcagatcggcgtcatcctgcgtgactcgcacggcattgcccaggtcaagagcgtgaccggctccaaggtgctgcgtctcctcaagaagaacggtgcgtccgcatacattacctccctattctctacaggcctagtgcttcatctatctattgtgcggctgctcacgtgctctgtgtattgtgtggcgcttgctctcgtcgactgcgtgctcggtatcacctgacgtgcggatccgatggctctgcctctccgtttgacgtgggggtacgcgggtgttgtatcatcgatccatcgattgatccactgcaggcctcgcccccgagctgccggaggacctgtacatgctcatcaagaaggccgtggctgtgcgcaagcacctggagcgcaaccgtcaggacaaggactccaagttccgcctcattctgatcgagtcgcgtatccaccgcctcgctcgctactaccgcaagaaccgcaagctctcgccaaactggaagtacgagtccgccacggcctcgacgctggtggcttaagcctgacgcttgcctcttgcttagcgtgaccgcaatacattgtgtccaattgctgggttgatcaactctactgctcttctcctctatcttctccatcaccgccgtctcctgctgcctccctggccttctgccgcctgcgcgcgttctccaccatgaccctgtccctctccttgctctggctgcggcagtcgcgctccaggtgcctggccagcgtcttggccacgatcgtctcgccgcagtccgcccacggacacgtgatgaggcggttgacgcactccttgtggcagtgcagcgccatgaagcgcctctgcacgagctgcgcgcagttgaggatgcactcgaccagctcgcgcttgtcgtggtagcgccgcaccagctcctcgcggaacaagtggcgttcgcacttggcgcgcaggtgctcggcctcgctgctccagcggtagacctgctcgcagccgacctccttgcacacgaccatgcggtgcacgcactcgacgcggtggtggcgctcgagacttcggaaggccacgacctgctcgcagtgctggcgacacggcaccatgtccagctcccggtcgcgcgcgcgttgggccagcagcttgagcttctggttgaccacgcagcacgtttggtcgcgcagggacggcgtgggcgggatgccgaagcgcttgcggacttccggcgtgtcgaacaggacccaggctgtgccgaagcacgcggagcgcggcagcttgagcgccatgtcgtccaccaggtcgcccatgccctcctcgaacgtccagtagccgagcagcttcttgcacttgcggacgtgcaggatggaggccgcgtgctgctggatctgctggacggtcctgcactccttccagtagcgcacctccagcacgaagccctggaacgactcggcctgctccttggtgccgattctgctcatgggcaagccgaagaccccgcgtcggacgctcttaagctcgccgttgacgaagaggctgagctccttggccccggccgagaacacgacgtggttccagcggatgcgctccaggcgggtctggaagttgacttccctggccgctttggcgcctgacggacggtagaacgagatctctcctttgggtccggccacgagcgagatgacgttcttacccgaggacgcgatgatgtggcggccgcagcgctccaggagctgcgtcggcttgttctccgacacgagcgccagcttggcgtccaccttggcgatctcgcgctcgaacctgcgctgcaaccgcggcgtgtcggcgtcgtccggatccaatgcctccagttgagcttgaaactcgctgcgcttcttcagcagcttgttttgctccgccgccttgcgctgccgctccgccttgctctccttgctgggacttccggacgcgagctgcgttgcccaagcgtccaggtcacctagagccacgcgatcgacttcaggcagcaactgcactagcaacgtcctttcctgcagaatctgcgcggtttggtcggcgatagaggccgcaagcgcctgcttggcctcctcgtcggccacgtcggcgtcgagaatgcgcttggcctcgaggatgttgatctcgatccagcctcgagccaacgcgatctccttccgagtcgccagcagcccgttctcggcgtcgttgaagtcttccgcgagctgcttggctgcactcgacatctcctcgcccgagaggtgcgtccctgctgcttgcgccttgtcgttcgccttgcgcttccgcttctgcttgagctccttgagcttcttcttgcacgcgtccgacttggcctgccactgctcgttctcgcgcgtgttgagcacgaccgtctccatcagctccaagctgcttcggtgcagtgccagaatctcttcctccgcgtcgaccatccacacgaaatactcggcagtccacggaggcggcagatcgacggacgattgagacgacggagcttgactcgtgttgttgttgatcgcaatgtacgcgttgccgcccgtcctgaactcgatcatgctgcggtccttcgagagcgacatgaagtcttcgtgcaggtgccggtctcgccaccgcagtcgcgctttacacccgtgggcggcattcttacacgacacgatgcggctcacgcagtcgtcacgaaagtgccgctcgagatgccgcagtcgaaccaccaccccgcactcgggacaagccacgggcgagttcttctcgcgagctcttgccgccagcgtgttacgctcgatcgtcaccatgcagtccgtacggaggtgctcgtcgaatttgcctactggaacccactccttgcatccgttgatagcgttgggacatgggcgctcgcgctccggacactcgtcttcctggtggtcgagcagcttgcgcttcttcaccttctgctgacaccagtcgcagacgatctcctcgttcactagcagcgcgtcggcagcgatctgtctccgtcgctcagccacgacgcattggctcgcttcgtgggcttcctgctcctcctgggggaacttcatctcgcacccccactcagcaaagcgacaggggactcgacgctttacgcacatgtacagttgatggctctgcaggtggcgcttcctgatgatgaagcgcgtctcgtgacacagctcacactcgactggggtgtcgccatcgtctcgatctcggagtagttgtcttgtgtgccgagtgaattggcagtcgcgttgctcgtgtagctcgcggtgtgagacctgaaaaagcttcgtacatcctggcctaacgcagcgaattaggcggagacgacactcgtgctgcagatggaacctctcatccgcaggccgcatttcctctccgcagtcacacagtattagatcggtgaaagagtcgcaacctgctagctgacagaaagttagacgagcaagaccattacttgggacagtacagcaacttacagttgtttgcggggttggacttgtgctttgcttgcctgtagtctgaagagcacaaaggctcgagtcgcacggacggttggctagcgcttttgctcagcagtttttgacgttgcaggtttacattctccagcgctcttgcgagctccagtctgtcagcagcagagaaaatgcaacggaagttggaaacctgagttccatcacgaaggcacgggcctgcagcacttacatgtctgcctggagatcttgagctgcctttgacgggctggtgactagggcgggagatgctgcgaccagcttcggaattcgcgcaggcacaaactccagtcgcggttctccagctacagatcctcggcggcttgagtccatcatatctgctccaggttcacttaccatggtctctgctcctcgcctgaaatccaccaaagttattttttgatctgcggttcacattagcaaagcaagacgaggctgggtgaagctgtcacgctatctctattagaggtacagcgacacatcgggtcctcgtccaaagagctggttccacgaaggcgggaacgcaaacggaagcatcggcggcatgcggttggaagctgtcgctggatcagcagtcgagtgcttgggcgcaattcgcagcgaacggaaaagctgcgtcgccatagccgcagcatccgggacattgttgccctcggaacacggcatcacccacgcgatgaacggcagcttctgctcgtcgcactgcgcatgaagcagaggagcgaggccagcaccgcggatcggcgcccactggtcggcagacgaagaaggctgctccacctcatccttagcatcagcggtgttgttggtcaggccttcaaagcgcgtcaggaacgcttcctctagctgggcagcgtcggcagagtagatagtacggatcgggcggctggaagagttcatgcaacgcaagacaattggtaagcaagtagcagtggtatcgaagcaatagcaccagcaaccaacctcatcatgttggggtcgtgacgcagcatgtcgtcgcagccagcgaccactcctagcgcagccaccttgctgctcagagcccactggaccagctctttagcgaacgcacgcgctcgacccttcaccagcaacaaatggcaagacatgagcgtcagtccacgcctagcatagaaagatgctgattactcccccaccggcagcacaggagctcgctgctggacgatggtgattttcttctccttgctctggtacactgcaaccaacagcccaaaacttcagcatttgcgtccctcgagtccactgtaccatcttggccacgcaccctccaggttcagacacagtgactgcggctgctgcgtggcgaaggcggcacctccagcgatggggggcgccgcttcgctgagcaagtggcccacgcgcgtgagctgcacgtcctgtttggcatagctaaagtcagttctgagccttccactgggccaaatgaggacgtatcaccacggttcatgcaacaaattcacgtacaaaggcctcgccattctgcagcagcgtgttgacggccaggtccagcgtcaattggcccagattcgcctgggaaacggccggctgcaggcacgacaagaaagaatgatacacaactttgtgagtggattgagagggagcgagagggggatggaaagtgaaacttggaggagaagggaggtggagatgtggtaaagcagacccgcgtaccagaagcaccgtgtggtcggcgaaaagcgcggcgcaagcggcggcgtcggcggcactcgccgcatcttgagggtagaactccatcgcgggtcaaaagtgggatatgaaggagtttgtatggggtggaatagttgcgtcggattggctaaaatcgggttgtattgagaccatcgtgtaccattcgaatggtacatgttgaagagaagttgccttttgattatcaccgcgatggtcgacatccagcgtcgacttggtgccagatgcccgatgccatgcttatttcgctgtccgactagcatcaccttacctttccttacttatcttactgtatccatgctgcgcgcgcaagcacctgtttgctgttcagctgacaaagctgaaagttctgcggcctaggtgtgctcgaccacgggcttgttggttcttgcccttgacagctcgaccatgtgccttcatagagctgagcgctttcctgttaccaagctgcagcccgctcaccagttgtgctaacgcttctcccatccgctggcagaggctcgcatcagcacatcgagcgagtgttctgatgccacttaccaaaatacccccaagcggaggtagaacgccgagtccaacgattcagcctcgcgtgttcaagcgaacgtagaagcccccacctcaaccgaccaaccatgaccatgcgagggcttttgcacaggattcggcacgctccatcctcaaaaacagttcgagagggcgctgctgctgcagcgtgcgaagatcatgcgcctcagcgtcagagcaggcgctctcgagtcagccacgtcctgagcaaggccatcgaccctgccgacgaagcaatggaggcgcctactcgacgccgcaagcgtgatcggatcaaaaactacttctcgcgtcgacggagccacttggccaagagctctcggtcgtttctgtggcccgccatgctgtcgagcgacaaggacgagtctcggtgctccgaaggcaccgagagcgacgacgtgtatatggtcgactaccaaagcgactcggactcggacgacgactcgctttgcgacgacaactacgtgacgccgcccgtggccatccccgaaatgtaccgaaggcaggacagaatgggaggcatcacggtggcaggcgcgcgcgtgctcttcacgtttgcagggttcaagcggcagcagatgatgctgcgcaggctccagtcggtctcggaggctgacgagttggtgataccggctggcgtgcaccgcgagtacattgtcatcccggcgttctaaacctccatgggcagaggtcttcatatgtacattagaaaccgtttaactctcgatgttatgaagcgtctatttgatcactcaagccttagcccttgcagagctcccagtacttcttcttgcagcttgactgtcacatgaagcatcatcggtagcaaaatggcaggcagaccctgcgtacggacagaaggcgcactcggcaaagctaggcttcggctcgaagttgccgctgcgcaggcccgacacaacctcaatgatggcgtcctcggcttcctgagccgcttgctccgtgaagtggacgaagccgtcgtcgttagtccgcactctgctaattccccgtcttcctattgtagtgctgggatcagcgtagttgccgccgatctgctgcagcttcgctccgtacggcgcctcgccaaagaccttgcggaaggcgtacatgtacatcttgagctgcaggctttcgtccgctagcttgcgcatgttgcgcgcggcgccgcccatgttcgacttgaactccttgatgacgaggggggaatgttctgcaccgctgagactccgtactcggtcgatgcggtcccagacaccgcgcaactcgacgtttgcctcagggacgtggacagcaaactccttctccacgtgaacgatctcctgtaatctcacgtctccgtgatgagtctcaatgaaatcccacaacgccatcatcccgcgatcaagcaggaaggaagcctgttccttcgacgcgtaaagcccatacccgtcaccagcccacgcacgcacgaaagcttcctccgcttcgaccgccgctcgtgtcttcgcgtcttgtgtctggtcgccgttgcgctcggaggcagcgagagactttgcaaacgcagcaatgccttcgtgcaaggcgcgtccaaacatcatcgcggtggagacgtcgccatccagcttcataacacgaccgaggtagtaccggtgaggacagcgcaggtactcggagatctgcgaatatgacaagtgacgtggttcatacggcaagcttgctgctggtgccgacaaacgactagtggcaactgcgcctccttcaaattgcttcaggtcttgactcgtttggttctccatggctggactgtagccggtcttaaggcttgcagcggtgttcgtgctgggaagcaccttgtcacggtgcaacacggggagtaggacgcgatgcacgaactcacgcagaaacccagccacctcggagagccaaaactgtggggtttcctgtgttggggatacggtacctggagcggcgacaccctttgtagacgaactcccagttgctgattgcgtcccgtgcggaggcgtcatgtccgacccgcgcctcccttggcttccgcctttacgacttggggtttttggtggccggtctccctcgtaccagatcggctggaatgaccgactcaacacctcgcgcttggacgacgaaatacgtgcaagttctgcaaaagacagcaccacctcatcgtacgcacccagtgtcaacgccttatacgcgagctgttcgcattgctcgaggtgttcagatcgcgtttgaacaggatatggcttgctcagcagctcgtacggaagcggttgagtgagacgcttcatgcgtccaggaaacttgctatcacgcatggacatcaacaccagcatgtgcttggtatcagcttgctggtcacttgtagtaaccgcgagcgactcaagagcgtaagaagtcagtggaaggacgcgaatgcacgtgtcctctgcaactgccttggatccgggagtgttaagttccgctgatacttcgtcccatgccgctgacgacgtcaagttcgtctccctcagctgctgcaagtacggagccacgaacgccacttgggcactcttcacgacattttgtgcagtccccagctcccgcagaaagtccgccataaccagagactcgcgctcttgctccggagaattgggacccagcaatgtctctaatcgaccagtttcctccaggaagttctgaacgatttcggcggcggacagctcgtggcactcagcgcgcagtcgtctgatgattctcacaaacgactcagcaatctccaggccagactcgagttgagaagacactacggagggcagctccagctcgtcaccttctctttggtttagcgaggtacccaaagacttgccacgagtttcaacgaaagcttcgagcactgggaagaggtcaacgtggcttcggcgctccttctccatcaaccaagaaagcagctcggccgggaacgcaaagaaacccgagcgtagaacgttgtagaggtggcgagaatcacttgggaagcacaatgcgcatagcagcgaatacacggcgttgacgccgggttcatcaaagagatgaatgggagcgccactggagttaacgattgaagagaactgatcggcgtccatttgcactggaagtccctgcttcttgaacgccaacaatactcgactcgcatctgcatgagaaggacagagcacggtagcgtgcccagagccttctgacgccagccagtccgcaagatacgtaccgatacttctctcctccgcctcagacgtattgaagttccagcacttcaatgggacaggtgaggggatacctgcacttacaccaccgctctgcgtcaaaacctggctcgcaaacgcccgcaccttcgctctcttagcttcaccatcatcttgtacatccaacgcaacgcggtccactgtacgcggacatcctgttgctgccgcagtcacctccaactgccgctctaagatctgcgtttgaaaacactcgtttccttccagcagcacgcgactgaagctcgcactggacaggacactcggttggccgcacagatggcccgcaagcctcgccatcgccggcgtcatccgctgcaagtcgtccagcaccacgtccgtgtattctctaagcaccgaccgactgaacgccgttgtcgcccccgcttcatctgctccatgctgcagcccacacatctccagcacgtccagcactagcccgtcccaagacgtggcgttgtgctgcagcagcagctcctggtactgtctgtaggtctcggccagctcctgaggcacctgctctccgcctgcaacggctgcggccgaatactgctcgggcgtgacgccctccctctccagcagccggaagagctgcagcaagtcctgcaccgccttgcgtctctgcagcgtcgacgtggccgcgagtcgcgacgcccccggcagctccagtccattgtgcagtagcagcgccactaactgcgcgcgaccgaacacgcggcgctcgcggccactctcgcgcagcagcagctggcagaactcgcgcgcaccgaagacgccgtggccgcgccgctccagctcgaaggcgggcgcgtctcgctccagcgctaagcgagtagctgagcccgatgcagagctgcctgtgagcagcagcacgcggcgctgcggctgctgcaggagtccgcgtacacgttgcagcgcctgcaggttgggcacatttgtgaccaaactttgatgggcgctcctggagccatccgggcacgcggagacgtcggagttggatgcatgggcagaggaggcgacggagaacaatcgacgagtatagccgctggatggccagcgctgccgcaggagcgccatgcgctgcagcgaccgcctcgccactcggtccagctgcgcagccatgttgcgactcgaaggacgacgagccaatcaaatgcaagtgagccaattgaactggttgaaccgctagattgacaacccgaatttgaaaagcaagcttagtagaactaccgacacgaaggaccctcttcgtatttcctctttggtcactactacaccacatacgttccccagcaaaagaaaagcagcacgcagcaccttggactctctccgacgctccaaaagccgatcaggttaagccgtgggctagtacatacaggctgtgatggcggagattatcgcgtatctgacgctgtgatcaatgcgctgcgcatcgagaaaccacatgacctcgagtttcttgcaaacgatagcatgctccattgctggaataatggcgacctccgcgcgatgctctaacagccacttaaccacgcccaagtgaccatgcgctgccgccatattcatcgctttggccgtgcacccctcgggtcgattcgcgtgcaaccattgcacgactttcaggtgacctgctgacgccgcatcgtccattgcattcgtcgtgcacccctcgcttcgatttgcatggagccattgtacggtgtccagatgatccccgcccgcagctgagtccattgctttggtcgtgcactcactcctgcgatcgtgcagcaaccttaaaacctgcacgtttccgtttgctgcagcaccatccatagctttagcagtgcagccttctagagaattccaactcagccaggagagtgtcgctagttgatcttcgtaaaaggacggcggcgtcgcggttaagcaacaattcatcgtcttagtgcctgaacacgacggaaggtggaagtgtcgacaagccacaatgtccatagtatcagttgtagcaccgtcatcatttttgtgccaatgcaaccactgcactactctcaaatgtccatttgctgcagcacgatcggtagcagatgtggtgcaaccttcccagcgataagcgtgaagccacttcacaacatcgaggtgcccattggcggcagcaccatccatcgcagcagtcgtacagcacgggtatcggccacgctggcagacttttttcgctcttcttttcagcttatcacgagattctgtttcaatgcggtccattaccttcaagtgcccgttcgtggcagcgatatccatcgctgttccattcgccctggtgaaaagagtaatgcgttcccacagccacttaacaacctccaagcgtccgaacttggctgccgaaaacatggcataagatggaccatggctttgaccgtggtcatcattctcaagtaaccactctatcactgaaatatgagcatgttcgcaggcttcattcaaggcatcatcgaacacatacatagcgtcttcaacatctccgcctttgccaatgccaatggcataaaaccatcgaagggtatcaagatcaccgtgtcgcgccgcatgcgataccgagacgtctgtaataaaactggtattgccatgtcctctctccagcaaaaagtgcaaaatctcaactcgagtcgcccagtgctcttttgggcaatgttcatagctaacagtggatccaccaatgccctccgctacaagccacttgaccttctccagattattttgaaaacagctatcttcagtagttcatcgttgctggcctgttgtcgtgcccaaccaatccgctcatacagccacttcaccaagtcccagtgcccaccttctgcagcatcgctcaggcatttcgtggcccattcgccgccccactgaatatcaccatgcgcttgatcagcgtcaagcagttgcaagatccacaagtggcctcctttagcggcctctcgaaccacaccttcagtcacgggcagcctgaaaaatggcccagaagctattggatcatcaacagatcagctctcttgtccgttgcttgcgagaattcccattgataatagtcctggttagtgttgagaacgtgagccaacgttgccttggacgtcgatcgacggctcctgctccagatcgtctcgagtagatccagcgacccgatcgcactcacttcgcaagcgcgcgcgactgacatgtcggcgatgaggaagtcggaaagaactgccgccagcgtttccggcgtgttggttggtagcttgtggcgcacgacgaagctcgcgagcgcaagctccacggactgcgtcattttgtgctagttcgggaatgggagctggaggcaaaacgaaatggacttgcgaagcttcaagaaagttcaccgagaagcacaactgccaacggtatcgacactcaaacttaactgtaggaacagattcaacttccgcgtgataaaacccgtcaaacgtgcagtctccgtgcactcactccactaacgctgcggctcggcgtttcgtgttccacaagtcgtgcatccacaggtactgttcagggttatcaagcactaacttctccagcatcaaggcgtatgtctgaacaagcgcacttgcttcggctctgtcggcggtctgggtcgggcccgccgtcttcgtagatatcttcattgagcaagaagcacgcatttcgaacgaatatatcttagcatgagactgacagagacacacaggttgtttcaactgagcaggccttaccggtcgcagtacgaggcggaagggcttctcggccggatcattcgacgtgtagtagcgcttgttgtgcagtacggccgcgaaccagagcgtcgagcccgtctccaagtgcaaccgcgctgcacccgttgccaagcgcgtcggctgactgagaaacgacacgtcggcgcgcgtagattcactgttgcagcgctggtctgccacaagtccaaccagctgcgccgcagtgccgtccgagttggggcgctgcagaacatcccgaagcagtccatagcatttcttgtcctgcacaggcaatcatcaaggcaactaaatacctgctcgtcctcggcaccaagttaaagaacacacacacaccgggatcaatcggcggccaggagcgttgcggatcgaggccgccaggttgtccagtgtagcatcatggaggggccgatacacgatccactgcgtctgaacgggaaccgtagggcgtgctaaggctgccggcagaatctcccagaagcctgcacagtcagacccacagcaagtgagtgagctacctcaccaagacagatttatcgacaagcacaacgcaccgatgtggccggtggtgatgatggcgtgcgatgaagaccctccgctctccagcactgtcttcacggacgttagcgacgcgcgggtgtcctcatcgactgcgatcagctcctgtggactgggcactccttccagccgcagcagccacagcagcgacagcgccgcgtacgtgtacgagtcacgcgcgacgcgatggacgtcagtgtcgccgctcgggagcccgcacgcgattcgatgcagcaccacgcgacggcgcaggcgaacaacttgacgccaccagcacacagcgtcccagttagtaactgctccggtctcctgttagtccccgccccgccatgcatgcacatgccgcaccataatagaaaacgcgtccaagcgccgtcgccgcgacccagagcagtcggtccggaagcccgtgcgccagcagctgcaagccccgcaccgccgccgccgatgcccagcctgctgagagacctcgtcgccctggtggtggcgccgccgctggccgccaagcgctcactgcagtctccatccgcccgccgcgcgcccgccaatcagaacgtggcgtccagcgtcggccccgtcgccgccgacgtgtccacgccccgcaagcggccggtctcggagcgcgaggaggagcaggccaaaatggacgcctttgtcttcttcaccatgatgcggtagatgcgtcgtggtcgggcgggaaggttggttatgatagtcgagcagtacattatctaatacgacggagcacgcacagtcgattgcttccgtctcgtaagcggcattgggacgtatactgtctgcagcattctccaatacaccttcatgcctactctgcagtctcagttgctgtctgcttgtattaagtgacttggccctagcaacgaacactttctttagcagcagctccgtgcttctgagtgccgccgtggtcgcggcctgcacggcccctacctctgcccggactgtattgcagcggtagacttttatttggaacaccggtgggtctggtccgtgttgggtcttgaggacccgatacagagaccttccacgtagttacaggtttgttttgggtgggtctcaagaataggtcacgtacccaagaccctgttctaccgggaacggaaatacctccctattattgtgcatttgcaggagtgacaggcatcatttccaccacagataaaatcgttttgcaagagtgataggcattatttccaccacagacaaaattgttttctgttctacttgttcgtatgtttcttgttgacatataggtgaggcgaggcgcgtccggtaggcttagacccgggagggtttagcttacggaaacccgaaacttacaatgaatataagctccggttgacgtgtgaccttgtgcaatccctataggtgtcgtttatcttcggcggaccgagtttcaagttgaaactttcaaccttgggaatcgcaattgatcaaagatacaccgttcaccctaattagtcgtgccatgactatttaccgtgtacgacctgaagagtgattcaccctgttttcaatttcagttttctgaaaaactattccaatctaccaaaaactaaagatactacgtaattcggcttgccgagttctacacatttacggtctcttttctcgattttaggtgaaaatgaagaatgattatcaaaggtgcacgactatttaggtcacacgactaattagggtgaacggtgtacaggaatacagagaacttccggacgctactcgttccgggagtcctgaatgggagtgagatcacgagcaaagaccttctccaaaataaccaatatcaatacagagtctgtacacacaatatgcagcctgtcaatttaggttgcaccccgaatacaggtaaattcgggatgccccacgcgcaacactcctgaatgtcaggagaacaatacatgtaccttcctaccacacgcaatctacaatcgggtcatagggggcgattgccacaacctcctaaaacacagggaatatgaaatgcaagcgcacactgagagtgtacgccgcaactgggaaatgaaacaggtgtaccaacccgaatgggcaatacttttgggtacctgacttggcttgatgatgtagtgagaagtttccgggggccttggaccaggcgttactcaacgctcgcagcggggctccgaatggtacacccactcgtgggctcctaggcggtacactctcccgtgggcggcggctgtccttaggcgaatcacgaaccaggcacttgtgcacttgaacgcaaaacaaactctgttgatctttatcctcttctctctctctctctctttggctatctctcttctcttttgtatctctcacttcttcgttgtacacttctcttcttcttcgtatggtcttgttaccttgagggccgctggattcttcacgcggtctcctctgctcatatcttcatacacttgttcgggttctcttggcttcagtatacccgggcgtcgcgtcgcggcgcacactcatcactggatgtcggggggactcgggtgcctgacctggggatctgctgcactgctgacacatcgaactcagactggctcactctccatagtgaaaccaagtcacgctcggaactggcaccttggtcgccgacttcgctgacttggcacgttcctgggcgttgagatatctgtggtgtcttggggcttttccattcagggcagtcatggtccattcgggatggtcagcacttgggcattccgggcgttgtccattcgggatggtcattcaccattcggggtagttgcattccattcgagctcatccaggctgccgtcgactccacgagtttcggtggccacttggtctcgctgcttgaggtcctcaactcgttgtcgggtcacactcggggtcttcgtagtcgcagtatcctggatgttcatcttcaacatggcggtggtacaatttagggtgtcgatggcttggtacacttgagtagcttcacactcgagctgctgggtattcgaagtaccttgggatgcctcggactcgccaagaagggtagctctccgggatacgttcaccggggcacttcatggtctaccttcgtcagactaggtcgtggccggactgggtgctgcgcacctccggccagttgaggtcaaacgcgaccaggtatccatactccacatctcctccatcatgctcgggcgttccacaggtacgccatcctgaatcgacccttctttcccacactgtcgctctccctggatcggcgccggggccagctgcgtggacactctccaaaatttcaagtcgcctcgtgtcataggcaatgcgttgctgtgaaagtttttactatcgaaaagtcatataggactgtttcgttttcgcaaaataacattttcgacaaagtacatagcataaggatcgatttgctttggattggtgaatgggatgaccaaagaaccgcgatttccatactatatgtgtcgccgaccgtgtccttcgtggcatactccattgcagtgtgagttgttcgtcaagcttcggccgtgtgcgctataaggctggctatctgtaatagtgttccgtgagcaatgctcgctttggatactaagcattacccaccttggttcacggagaataactacaactgtggcaaatcttagatggaaaacaaaagaataacaagaggggaaaatgtagacaacgactggacacgagactgtataagagacaagcgtatccgttaattttggggtcaacggcatattttagataagggacgatgcgtatctgcaaagtggtattgtcgtacattcgcacgatggcgccgactctgacgacgacgacaatcatgttcgacgccattcaactgtcatccatctcaacggatatcagtacacccgagcgcgtcagtcacgtgtgaggatcgcttaccggctgtaaagggaaggtgcaatacgagtttgcctcagcagcctacatcaatttcgtagcccatacatgcagggctactgtgatcacccctgcagcagccgtagacgtctctacacggctggaagcagagacagaccgcctcgcgacgaccaatcaagggatgacagctcagcaaatctgggagtctgtgagtcaacaattttatcgacgcgacgacgggatggtgatcaggggtctcacacggctccaagtgatggggcgcgtacaccgaacacgccgcatgcacttcgggggtaatgtccatggtgtcattgatgtcccacctcttgcgctagtcgcagggaccgatttgacgttcttccagttccagcatatctaccatgaggctggccaacttcaacgtattattggatgggcacacccgcgtctgctcgagctgctccggtatcctggcattcagctttttgtagacggcacattttgttcggtgcctcgctcatttcaccagtgtgtggttgtgatgttgcgagatgccgctagtcgagtctttattccggtggtctacgttctgacaacgaaccgcaccattccgacgtacaaccgactgttccggttcgtggcggatgcagccgggcaaccgcttcgaccagcacaagttgtggtcgactttgaacaagccctgattgatgcggttggtgagaactttccgacggcgcgcgtaatcggctgcttctttcactggaagcaggcgattcgccgtcggatgattgcgctgcacctcccagcaggcacgtgctcccagcaccaggtccaatggaacaacaagacgtacgcgtagatcgacttgatcagctgcggtgaataagttggcaagcgtagtcagctagaatccttatcttttatatttctttttcgccctgcataacgcttttacaatatatctctaatattacataacttgtgtatcgaatttccgcatgcaattataaaggtcattatccccctaaattggcttggtcctgttttaggtcccttacagtttcagattggtctcatttttgggtccttttcgagcgggtcttgattttaagtcgcaagatccaaagcggaccagacctgccggtgacccgatttgaattcttccattgcagaaacgaacccagtcccaacgtcgcattgtcgctttcaaggatttgcgcactctattcgtcttataactcgtcttcgcggtgtcacaaatcgttgtgcattgcggataaatcgttgctcaaagcacgaattagctgtcatggccacaagttacgcagcgatgatgaactagacatgaaactttggcaacgttttaccgtagggaatgcattgttggaatgcggcaccacaaagctcacacgcacaaaatgcaacttgttcacttggaggtcttttggggaatgacctcagccaaactccttctccctctctcctagacatgcatgcgaccgttagtctacactacctcaactgcctcgtcccgtatctgctccagcagcagttccctgcaacttcaacagcggcaacttgcagtgttttccaacagtcctccctttgccgtgaccttgaagcttgcagcttcacggccggcaaaccaaactcagctagccttgctccttccgcgtgcacatgccaatcgtggcagacaagctctcgaatctaacctttgccagaggcttcgtgaagaggtccgcggggttgtcctctgatcgcaccttcagcatgtacagctccttcttgcgcacttgctcgcgcacgtagtgccacttcaattcgatgtggcgcgtgcggcgcccgaacgtggggttcgtggccatcacataggacgactggttgtccacacccagcgtaattttacgcttcatttcaggcagcatctcgtccaagatgttcatcaaagtcttgccttccatcgctgcctcgcaggctgcaatgtactcggcctctgcagtcgattgcgccacgatagtctggcgtctcgatgcccatgagatcgctccacccatcaatgtgaagacgtatccagtgatacttttccgtgtgtcaatatcatttgcccagtcactatccgaatgtccttgcaagtgcactccgatctcacaagtctcacggtcccggtaggtaatcccctttccaacagtgcccagtagatagcgcattacgcgcttcagcgcgccaatgtgctgctcggtaggatgatccacaaagcgactaagctgacacaccgcaaacatcagatctggccgtgtaccagttaccaaatacatcaaacaccccactgcctcgcggtatggcatcttgccgggggcatgattgcaggtcccttcatctgtttgttcgcactttctcagcttcgtagtagtctccatcgggatgccgctcttgttagactgtccctccaccaggtcgaaccgttccaggatctcccgagcatactgctcctggtccaccaccgtctccgtctccgtctgacggactcgaatgcccaagtagttcgtcaacagtcccaaatctttgaggccgtaatccttatccaaagctgcaaagaactcgcacttgaacgcctccgagtttgtcgtaatgatcacgtcgtccacgtaaatcaaaacgaacgccatggcatcgcccttggcgtagaagtacagacacggctccgcgtgaagccatacttcgtcatccagctatccagctctttattccactccctgtccgactgcctcataccatacaacgcttgatccacccgatacatagtgctgccaaaaccaggaatgtctcttatgtattgctttatcttcagctttgcattcaggtatgcgttgttcacgtctccttgccagatctttcaccctacctctcgtgccagagccaccaccaatctgaaactcgacagtcgtgccacaggtgagaacgtgtctttgaaatccaagccaggcttctgcttgaatcgcttggctacaatccgtgctcgaaaccgcacgatgtatccctcttcgtccaccttggggtcgaacacccacttcgtctcaagcaggtttgcaccctcaggcagttcatcaatcggcgacagcacgctcttctcaattagcgcccgcacctgatcgttcatcgcagcgaaccactcgttgcactgcgacgatcgcatcgcctgccgaaccgtcttggggatcttgacttcactcgccttccatctccgctgaccaatcggttctggatgcagtttcgagttcacgatgtagtcttccaggtacttcggtcgcttgcgctcacgaggctcgtatcgctgccgcttgtcctccctgcgaccagcaatcgagtcacgaccacgcttctcgcgctgcttcggctgctcgctgaacgaccgaatgcgatctgccaacgcacgcttctcactgccggtcccggcacgtcaactacaattgaccgcttggtcaatgcgtgacgttgaagagagctcgctcgtaatggaacgagcgcgtcgaagttgaagaccgctggcgcagcagcggagaatctctctgctgctgagtagcatgcgcggcaacgtgcgaagcgcgtcgctgccgcggggggcaggtacctatgtctgccctcgaagtgtcttcgggcgctgctgttaacagcagcgctcgcattacgttccagtgtgcagcgcatggtgggcttcgtacgccctcaccatgtccgggacgtcttcgagcaagacgttccgcggctcccatgtatcttggttgggacggaatcctctccaacggatacgaaagcgaactggttgcctgttcgttctcgggatactgtgatcaacaatccgctcaacaatccatcgagttgagccgtgtgcatcacgaatcggcggcggtggtggcggaaacaccccctgtgtgtggtcaacttggtgttgaccctgatctcgtgtctccccacgaccaagtcccggtcgtggagtagttccagagtgctgcgttcggcgctctgaagtattcgcagtttgcggcggcctcccagaccgcctcgatcgttccgaccgagctggaccattagcccgacccgctgctccagcgcgaagtcgcgctggagaggacgatcgcttccgccgagtcttctgcttcggttcagccgagctaggtagctcgtgctgcaggtatggcgtcagccttccgacgtagaacgtcggatggagacgcatgctagacggaatgtctagcgtgtaagcattgccatgccgtgccaatactgtgaatggcccgatgacgcgcggagcgagcttgctcgccccgaagtcggaaactgcatgtttaggcaggtttcgcgtagctaacaaaaccaatgaacccttcttgaatacatttgtgttgcccctgccaacattgtctgcgttcagcttctgtcggtcgacagaagctgcgatagcgtcctggacaaaccgaatgacggcttatctgcgctgtacgaagtgaattgcgtccgagctgaactcgttcagctcgcttccagcagtaggccctgcctctgcgttggtcttcgcggtgtctgtgccctgcacagacccgttcttcttcttctttttgctcttgtcggcgtctgtgccctgcacagacgcgtgcttcttctccttattgcgcgtagtcgcggctgacactatgcaagtgtcagcggcattctgcggctgctgtgttgcagtcgtagatcctcccccacttaaggaaggagccaccatcccgagtagactcgggaggcgtgggtgcatgatggcattcacgtagaacggtgtatgcccggtcgaggcatgcaccgtgttgttgatggcgaactccgccatcggcaggcactcgctccagtgttggaacgactgagcgtagctcttaagcacgtctacgagtacgcggttcacgcgctcggtctgcccgtccgtctgcggatggtccgcagtcgacattgaaagctgactcccaagaagtgtaaacacttcttgccaaaggtgcgcagtgaagcgcgggtctcgatccgacacaatgtcgatcggcatgccatggtgtttaaacaccatgtcgacgaacagacgtgcagtctgcttcacttcagcgggtaccgcagcaagatgtaccatcttgctgaagcggtcaacaaagaccacaacgcccgtgttcccctgactgtccgggggaagaccgaacacgaagtccaaagacatggactgccaacactccgacggagtcggcagtgacagcaagggagcctgcgcgaaaggcgcaggcttcacacgttgacaaacctcgcaagcacggacgtacttgcgcacccatttatactggtgggcccagtagaagtcccgcgtgagaagaaggtatgtcttctcacggcccggatgccccgcagtgatactcatacatcatcctgagtcgcaggtcatggtcattgggcacgacaacgcggtccgtgttgtcgtcgactgcacggtagagtaataacccgtcgttcacccggtaacggtgtgcacgagcacgaagatgcttcggcagcttctgacgagctttgtcaggaggagccgagccataggccagcaagagcttcgcgtccgcgtcgtgcgcgtacgcgaccttcacgtcgtccaacagtgacgacgttggggtgctcgatcgcacggcgtcaatggcattgacgtcggcatcggtcgtggcgttgtcaggtcgacgcgagagcgcgtcggccaccacattgagtcttccgggtttgtactcaacccggaagttatactctgcgaagaatgagagccatctcgccatccgttgcgagatgtgcggcgacttcacagccgtccgcagcgacgcgtggtctgtgtagaccacgaacggtttgcttccgagtagatacactcggaacttcgcgagtgcgtacatcatggcaaggagctccttgtcatgtaccgggtagttgcgctcagctggcttcagctggcgcgattggtagtagacgacacgatcacgaccctcgtgatcgtgctgcatcaacgcacatccaattgcgaagtcggatgcgtcacacacaacgtggaacgggcgatcttggtcggccaccgccaagatcggcgcctcagtcaagccctgcttgactgcatcgaaggcctgctgactctcagcagtccaaatccactcgacgtccttcttcaggagctgtgacagcgggcgtataatgcccgcgtagtccttcacgtactggcacaagtacgtggccaagccaaggaactgccgcagttccttgacgttcgacggcgtcggccactcattgatcactctgaccttctcagggtcagggcggacaccgttcttcccaacgagacacccgagcacgggtatctcgctcgccctgaagatgcacttcttcaggttcgcattgagcttgtgcttgcgcatgagcgcaagcagcttccggagatgcaccttgtgcatctcaacgtcgctcatcccgtccgcagctcggctgtggacgaacacatcgtcgaagtagctcggtgcgaagtcgcgcaccgagcgcaacaagtgcgtcacgcacctggtgaaggtcgcaggggcgttcttcagaccctgcggcatcactagccactcccagagcatgccgctcggcgtgctcacagccgtgagagggatatcgctctcacgcatgaggatctgataggatccatcgcgcagatcaagagcactgtagatagtgctcctggccatcgaatcgatgatgacatcttttcgcggtatcggtgtctgcgccgatatcgtcgcatcgttcagcttgttgtacgcatgaacgatgcgccaaccgccctgtggcttcttgacacagaacgtcggagcactgtgcggggatttcgattcccgcacttgtccagctttgcgacgactctcaaagaagtcgtcgatcgccttgacctgctctcgcggcagtggccactgccgcgtgacacagtacttcgtccccggcacgagatcaatctcgtgctggatgcccttgtcctgcggaagctccgcagggatctcttccggaagcacatccgcgcgctcccgtagaatctcgtagaagggactcgacttcagcgagtcccagctctgctcctcaaagcgctcgttcttagtcttcgcactgagagtgtcctcactctcagtggtggtctccatgaagaactgcctcagttcttcattctcgctcttcgttctctcggcgtccgagagaatgcatatttgctcgatgcgtccgttgtgcaagtcacgcgcgaagcgcttccagctcaggactggaagcgacgtcaactccgacgcttgcgtcggagggttagcgagagtcatctccctgtaccggaacccggcacaggtacgcgtcaagacgttcaacgtctcgacgtccggcttttcagcctccgtctgcccggcagacatttcttgtagcgtctcggccccaggccgagacttgcgcagcgaccttcgcatgcgccgtattcttgttttgcggagcccggctccgcttggttcttgacctcgtccaggcccagccgtggacgggtgttattcttgtattctgccggcgggttcatcccgcgggcgagcgacttcaagcccggcttggtcgcccggcgcttcgtcgtgcagcccggctgcacgccagcatgcacgtttttcctgtgcgggacgtttgcaaccatccgcaccgcctgcagcgtcggcttccggagccgacacgccatctccacctcgacgcttgttattggcggagccctccattacggagggtgcgtcggctccccgagccgacgaatcaaattcacccaagccatcgactcccggagtcgacggcgtctcgtcaccttggctcttattattggcccaaaactgatccaatcagattcgcgtcagtctccacggctgaggcgtgtgattcgtctgcgttatccgcaccccttgaggtcggagactcttcctgattcgctgaaaagcgggtgtcgatctccgagatcaacacattttctccttcagccgtcggcggcgacgccgacgcttgctgctcatgcgcgcgtgctcgcgcgcgcccagggcgctccgggacagcggcattaggcgctgtctcgattggggagtcgcgcgcacctgtcggtgcgtgcgtagcggcaacagggccatctctcactgttccgctgtcgcgaccgaagcgcacgagagtgcgcttctcccaatcgatgactggatcatgccgtgcaagccacggcatgcccaatacaatgtcaaacttatcgtccagatccaggacgataaaggtctcgacaaactcttgatcttcatacgtgaagcgcacgcgtaccatgcgcttctcggtcttcacgacggcacccgttgtcgtacttccaacatacttcgaggtatctttaaatcctcgaagtcaagccttgatagacttcgcagtcgaacaaagttcttcgacgcgccagaatctaccaaagcacggagagagccgcttgctctcatcgagttcacattcaggatgacaaggtcaggcttgtcatcttggctcttgcagtgagaagggtcctcactcctcagtgtcgcatgtccgagttggacatgcgtgactgcttcaccagtagggcgccccgcgcctactgggttccagcgttttttgtttggttgcgacggtgcccggcaccgccgcgatagccaccctgctggtgcacgggggccgtgcactcccgagcaaagtgaccgactctaccacaacggtagcatcgcacattgtttccctgcgactgctggggtccagcagttgcagcactcgagaggtccatgggttctgggcctcccgtcctcactaccgggcgtgactgtggcctcggcacatgtgcatgcagcttagtctgccgcaggctaaactcctcctgcattgcaagagtaattgcagcttcgagagtactcgggtactcacggaagagataggtcttcacaggcccatctctcagtcccttcatgaacgtgacgaccttggtcgcctcgtcgatcgggttggtcacgatgttcgagaccaagtaccgtgctctctgagagtaagcatggacatcatgcttgccctgctgcaggtcgaggaactccgccctcgaccggaactcgttttgcggtggctcaaacgcttgtctgagctcttccttgaaaccctcgtacgtgctaaagcacgtaggatctgagagtcggcgtccatacgcccaacttcttgcacgtccgccaagacatgacatggcgaacgcaaccatcgacaacgggtcgacgatacgtcgagccgcaatggtagtgtcgagttcgacaagccaacggaggagaggttcaccctctcttccgacatagttgctcacattgagctttagcaattgcgcgcgtggtgtcgtcccggacggcaccgcggtagtagcagcaacatcgcgttgctccgtcaggatgaaccccagagcaacaccgtgttgctctgtcggcgttagcgtacgcagcatcgtagctacagccgcctcaccaatgactgttgacagtcgttggagggcctcccactctggatccgacaggtggggacagtcagcgcgtgcaacgtgagttgcaggcgtagtggaactttccatgggcacctctgtatccatgggatggttctcagctccgcgttcgtgcggtgacgtacgaactcaggtagtcggtcgttggacggaccaacaagtgctaccaggtgtaatgggcctactttggcccactactacggcttacacgtatgcgcacgtgtatgaggaagcgtatgtttcttttatttgagttaagtatactcgagatccacgagtatactttaaacaagataaagactccaagtagcgtgttttggtaaaagatgagaactgctatttgtgttttatgtttctgacttcctctaaatgtaatattctaaactaggaatctgccaacggcagaattccaatgctatgcatgtcactcattggctaaaagatgctgctctcaaccaataggaatcctaagtctctatggaccacccgtcgtggtgatcctaaatgtatgtagcctttggtgtgtctacactaaggacgagaaagtctttcgaacctctaacagacgtcgtgtctgttagagttacaagtgactgtagccacttgtgcgtgtaaccccgttacatgcaccttcggcactctcgtcttcctgaacgtcatcgccggatttactgcttcaacctcatcttggccttcatcaccgacttcatgttcactctcaggtgcatcagcaacttcttccgtcatcggacgcagaaagactcgtgggtgcatcaacgtcggctcgccgacctctggactcgtcatcttcgtcagcaacggcatcctcttcaggttcctcgtcactgctctcatccgaagaatcctcatcagagctcgtctcggcgggcccaacagcttcatcattttcacttgaagatacactctccaaatcaacctccactagactctcctgatcgctgtcgttttcgtcatcctcgctatcccccccttcaacatcatcttgttgaccatcgggccatccatggtccacagagctggggatcgagtgacgatcacgatacaggatgtcctcgtgaacttgcacggtgtacacgacgcgcgagacgcgatactgcgggaagtacaccttacacgccatgcaatcctccagatagccaagtagaaatccagcctcacttgtatttgccatcatctttctcagatgctttgggatgtgcgcgtacactagcgacccgaacgtccgaatccgatgcaggtccggcttcttgccgaagaacagctcaaacggcgtccgcttcgtccccttgcagagaactcggtagcgaacgtaagctgcgttcctaagtgcgtccggccagaagctctgcggaagccccgagtggctcagcatggccttcttcgtgttccgcaatgtctgaattgcacgctctgcatagttgaccgaagacccatccggtgccaccgggaccaaactgatgccttgttctgcacaccaggccttcgttgccgtgcccaagaactcacctccagtatccgacacaacacgcttcacaggtttcccaatctgctgctcagcccacgtcacgtactgctgaaagtagcccgaagttgcagccttgtcagtgagcacgtacacagtcatccaacgcgagtaaccatctacaatcacgagagcctgcgtgtagatcgtgctattcttctttccaggatccatcaagtccatgaaaattgtttcatttggttcatcaaaaccgcgctcaaatcgcttgttacgcttctttctcttctgctttgtcagctcacaggtctcgcacgtcggaagctcgcggcccttaagcagcatcccacggacaagctccttgtcaaccatctgcttcaaatgctgtgcgcaggtgtggccgagccgcgcgtgccacgtgcgaatgttcgccacgccatcggcgttcgtgaagttggccatctctccatactccacaacttgtctcggagggtcctcaatccatgcattgtgcgcctcaaagtcccacacattgtttggggcaggtttacttcgcaacaccagcgtatcattccgatacaccttgcattcacccgtcctgccgttcttccgctcgacgaatccttgcttcatcgccaagccaacggagtacaagttccagttcgcgttcggcacaaacaacgcttcctccaaaaagatagtcgtcagagcaccgtcacccacatccgtcgcgagtgcagcaactccgactccaagtgccggtgactgcccacctttcgcaaacccttggatgtctcccacaggtttttcaaactcatggtaggcaacaaaatactccttagcgcccacaatgtgggtactcgcgcccgtgtcatagacccagcgacgggggttatagctcgcaacctccaccaccttctccgactcgtccttggcgtccgagtagttacccgctccagaggcacccgtcacctcatgcacctcgcactgcgactggcgagaaacagcactcgagtgatcatcacaacgagagactgacttcgagacgtcagccccgcttgcctcctttttcccagtcaattccggacagtacttcttgaggtgccccttttgattgctctgaaagcactccaacttgctctcaatcccatcgggttgttgctggcgctgcttcgacttgtgtttctgctcccagatttcccagtctttgcatcaccccacccccaccagcacgtccaccattattctccacacgaccacccgaaaactcatagctctcctccttcagctgcgacgctgccacgagaatcaaatcacgcacgtcgtccacagaataggaagaaccaggagtcaaagtaaccatctctgttaatcgctggtacttaacgtgccgtggaaggctcttcaacatggcgtccaccatgtccacatcgtgcacggtgtacttcatcgtcgcgagacggtcgcggatgtcgtacaacttgcccaggtgcaggttcatgtcgtcgtcccgcttcgccctggtgctccgcacctgatgcacgagctgccgctgttggtgcacgaacagcgtcttgttcgtcggcgcctcaaacatttcctcaagtgtcttccacatctcggtaccggatgccttccgcatcacgcgctgggccaacgccagcgaaaccgagccgaggatcaggcgcttgatcgtggcctgcctggttctgcttccagtccttcttctctgtgtccgtcaccgtcgggtccggaggcttcgccttcccggtcgcgatgttctccaagtcctcctcctcgaagagactcatcatcagggccttgtagaagtcccagtgttccccgttccagttcaccggaacgcccttcgtgttcaccttcaggccagccttcggcttcccgttcccgacatcactgcgcgtgtccagagtcttctcagcgatgcctattccaaatgccttgggctcagtaccctgttggaatgcggcaccacaaagctcacatcacaaaatgcaacttgttcacttggaggtcttttggggaatgacctcagccaaactccttctcccactctcctagacatgcatgcgaccgttagtctacactacctcaactgcctcgtcccgtatctgctccagcagcagttccctgcaacttcaacagcagcaacttgcagtgttttccaacatgcatagtatactaagaagcaatctatgtcgaagctcatgccaagtttgcgaaacgcgcgacaagaaattcataactctgtgcttatatcacggttttgataagcatatcaagtacctaatcacacacataggctatgtgtagcctagaattggcagttgagctggtggttgattttaaagtctccaactcctaatgcggggctgggaacttgctatgcaaaagttcaaactcgtggaagtgtatgatacactgtatctcgggaagcctttcgttgcatggttgaaagtcattgaagcggagtataactatccatcaatcacaaaagtagtctcaattttggcacttgttattactagaatagcccccatcacgcagaaccaggcagccgacgtcatgcccctgagccgcctggccgcctgccgagcgtagtcaccgagcgatccccagacgagtgcaagcaggcaagaggcagccccatgtaccatgtggccgagatggtgcgcgacgcgcggcgcgacatggcggagcggcacgacggcgcggcgccgcccggcttcgtgtggagcacgctgtcggccttcacgcccttcccgttcctgctggccctgggcggccagatctccagcagcctcgtgcgcagggcccccgacctggtgaagcgcgcggccggcggcgcgcgcgactgcgtggtggacgccgccacgcacacgcacgagcgcgtggtggagctgcgcctcacgtgcacgcgcacgggccagcggctgttctaccgggtgaagctcaacgtggagacggccagactgcccggcccgctggccccgctgcagacgcaggtggccgtgccgttcctgcgcggcatcgagggcctggcccagttcgtgacgagcgaggagctgccggagctctacttcgtggccaagaactcgatgaggcgcagcttcttcctgcgccacgtggtgctgccgcccctaggcgcggccgagagtgtcgtgaggtacgtcgtcatcttccccagccacattgtgttcccgtccagggccgagatcgaggaccggacggacctgttcctggagggcagcaccacgcgggtgcaggctctggtggaacacttgtactcggccacggaggtgctggaccagcacttgagcatggtgcagtggaacatcctaggccgagggccatacgagtccctgagtgcgtcccgacgcggtgaagtcatcaggtcggtgcaccagagaatgaggatcatcgcgtcgcactacaagctgttcgagttcctggccaccatcaagttgcagaacgaaatgctctactcggacctgcagcacgagttccctgacgtgggcggcgtccctctcacgcccgagcaagtggccgccaacaaggtgctgacggccgagctggccgagcaagatgcgaatgccttccccatctggttctacaagaagctcgacattaacagcggcaacggacaggtgttgcccagtggcttgaacggacgcagcaaggcgacttcggatgcgagtagcccggtgaactccagccagtctggcccgcctgggtcgaacaccaccactactggggcgggaagctctggcggctggatcgagttccccgcgcacgaaagtcgtcgcctcgagcggaaattcaggtggtaccaacagcagaagagcaaggtgccgggccctgtggggccatccagtgttgttttggttgacgagggccgccatgaggtggatttggagagcatgcgtatgaccccggtgtactggccagctctggaggaaatcgttgtttgtcgttcgcgttgggtatacgcccagcgcaattatggtctggccccatacaaccctgaagctgctgcagttttggagagcgctttcgtatattacttggggctgtacccgctggagaaacagcgtctcatggatatcgaggctcagaaaccacgtggattctttagctctcgtgccagcctcagtgaggcggttctggctgctcgcgtggagaaggactgtacgctcagcatcccggttgaagggcatctcgttgaatttaaaggcgcgcaagacatcatgcagtacaagcgcctgctggctggcaccaccccgttcacaagcaagcgtcgcgtgtatcgaggagacccgcgcgtgcgtgcggatccaacaactttgcagctctggaaggatgccatggtgtgtgatccagccacaggaaagccgctcaaggtcactgaggatgacaaggacattgaagaagagattgaacacctcgtgctgatcgtgcatggtatcggcgatgcgctcaagacacttgatctgattaacgttgtgaccttacgctccatcatcgattgcgccacgacactgcgcgagttgaatcgcgaggcccttcgctcggcgcacttcgctcacttgggaggcgaggatgctgatcccgagtccattgaaagtggcaaagttccagcacaccgaccgcgcgtggagttcctgcccattgagtggcattcgaagctgcacatggagggcctggaccagctcatccgcgacgtgacactaccggccatccccaagcttcgtgaactggccaacgacacggtcctggatgtgctcttcttcatgtcgccgctgtttcaccaggtcattttggacgaggtggccaaggagatgaaccgtgtgtacacattgttccagtcgcgacacccggactgggcggactcagcttcttcccgtgctgccgaatccaagcggaagaaagtgtccatcattgctcactcgctgggttccatcatttgcttcgacattctgaaccatcagcaggtatacatgcagccacagaacgccccttgcacggacgatgaaggcagcagcagcgacgaaaaagaagacgcggtggtcgagaatggcaacgagggcaaggatgagagcagcaccagcagtgatgacgatgccaccgaggatgctgaagcgaatgggattatgatggacaactgcaacgtgcttggatttgatgctgccctgtcgaatatgaagctgaagcggcgctcgagatccatgtccgagatgtccactgcgaacggagtatcgagaagctcgcctcgagcgtggcgtcaagagatcatgaagcaggagaagcaggagtcagctcggcgcgcatctccgcggactcgtcgcacaggacggaaatctacaacgcccaagaagacgaagaagcacaagatccatgggtctgctgctgctgccccagctggaggctgcggggttgtcccgctggtaccgaaacttgcgtttgatgtggaggatctcttctgcttcggctcgcccgtgggcctgttcctgaatgttcgaggccaaaagctggatcgcgacttccaactgccgcgctgccgtcgattgttcaacatttatcacccgtacgacccggtggcgtaccgcatcgagcccattctgaacccggcgcgcgcgcactcgaaggctgcgattatccgcacgttcgagggcaagctccgcttccagtaccaactgcgcaactcgttccgggcgatgtgggcctcactccgacaatggcgtcgcgacttcgagcaccaagtactagccggagcgcacagcgtggggctcgtggaaagccccgcttcaatgaccccgttgtccgatgcgctggcggccgtcgcgcaaccgtatcaattgcagcggcgtccggacgaggcccaggaagagcagcaacgagaggagcgcgagggcgacgcaagcacagagaacgtggcggtcttcggtcggttgtgtcaggggctgcccatcgactactccctgcaggaaaatgagattgagatcgcgaacgagtatttatttgccctgacggcgcacgtcatctactgggccaaccgcgacgcgagtctgtttgtggcgcagaagctcattctggagccggctaccgataattggcccggaagcagcgagcaagacgcagcagcggagcttccggggcgagtggttagcgcgtttgagcagatcagcagtgaaggagctaccgctgaagcggtgacggagaagttgcgtgagaaggaggaggcgacggcatcgtcggaggtgtcctcgggctccgatggcgagattgccgcctcgcttcgccgaagaaggcaaggaggtgtcactactgctccgtaggacccagagctagctcgcagtaattagtaaggataagtaagtataagcggttgttcgacgtcattcgacttcaatgttggtcgatctgatagcgatcgtcttgcagcgctgccgtaagcgccgattgtgtcgcacgccacgatattgtcaagaattgccgtgtccggctccaccgagacaccatcaagaaatcgtgcaggcaccaacaccaccagtgcacaattggtatccgtgcgagtcgtccagagcatggagcaaatccagctccgtacgcacgacttcttgcacttcgaacaccgcagtggcgttcgcgccgacgttgatagaccattgtaggctatcaacttgatagcgcccggacttggattcgtcggccgctgatccgtacaggcgtccccggcctattcgccacactggtacttatgatgtttgcgaatcaacaagattcacgcggtctgaacataaatgagtatgtactgacttgctaaaagcttagctcaagaatactggaggtattctcgcaacgtgccacttgtcgcagtaggtctcgctgtacactcatctaaatcaatatgcttgcagaagtagcgcgcaaatcttgagagcttgttgtacttcctgtgcgaggtacatcaaaatatacagccgggactagcccggggacgcctgtatcatcaatcgctgccatggcacgctcgtgcatggactccatgccatggagagtatcctccggatggggcttcaacgctccctgtaaatgaggctcatggtgaagccacctcagcccggctgcgccaacggggtcagcgcatcaagccactcgccactgtgttgcagtctgcaaagctctggccgcggctcgctcgccgtgttcgcactgcgaacttcgcagcgcaaacgcatcgtgaggtggcaccgggatttgcacgaccgtagagggcgggcggctcgactaaggaggcgtcttcgtctctggccattctcttcctcgccatgtgctaggcgagcgagcagtgctggacgccgtcgcggtggccaagactcgagcctcgagccgcacacggagcaatcacgccagcggggccgcgcacgaagcgggatctgcatgtccacccggactgtttgacggcgacggtctcttgctcttcaagccggcttccctcggccagcagtcgcgatttgagcgggggccacacgttgaaggcaggtgagcccgcgagtgatttaagacgatccgcgcggcgagcatgcagccgtggcctcggccttggtgggtcttgagcgcgtcgggcgtggcgtggcggcctgaagcacatgatcgttacttcccttccgagcggacgactggccatgtggggctggaggatgaactgcgccggccgcgatcctcgctagcggagacctttacgagcgcgacttacattagctgcgcgctcgacactcgagccgcggatacggctgctggccaagcagaagcgatcctcagcgggaagaaagcgatgtacgccgtccaccgggaaacacaccgcaaggataatcgaggccgtgttcggacgggcgatggccccccttgacaccttgcttgactgcagcggcgatgacgttgtgccccagttcccggcacacaccacttcccgcagtgtgcagacgtgggatccagccatttgacgcaccgaaatggccggctggctgcagacgctgctgcgatagcggggagcaacgacaccatggagctcgatagcaagcgagactcggcagggcgatggtgtcgttgaggtccacgcagttgcggcggcgtcggcagtgctcctgcgcattgcaggcctccggccgagcgttggcggatcagcgctgcgcgcgtagatatgcaacttcaacggctcggttttgtcttatcaggcattctatttcttctagcgttgaaactccaaggggcgcaatcgatgccggctcggcatgatgggttgggagatccagtgtacagacacatcaggggctccgatccccgatccgactatgaaggcgctgctcggccagcgtggcgcccagctgcaggccgaggcaatgccggagatggcgaagtctttcgaggcgccatcggcagcagcagcagatcgacggctgctgctgttgcagcgatgctgtgcttgcagttggccggttactagcggccggccgcggatgtagagtaaggtactgatgcggtctcccctcctcaaggctcgaggttcgagcgctccgcgacttggagcctctgcaatgctcggccgcgctcggcagtcgcaaccgagcttgcctgcgagagatggtgcctgccgcgctctctcgactggcgcgcgcgccttcggtccggaggtctgcggcgcggagcaagcccgcgatgggggcggcgtgtgtgtgacgtggcgtggcgctgccggggcccggccaccgcacgcgccgcccttctctctctcgaggtgtcacgcccggctgtcggcgctcggccggggaagagtgtcctcccgggggaggctccccagcagcggccgatcagcaggagcggcaccagctgactggctccgtgatgctcatttcctctctttctccgtcggaagctcgccgcgccgacctgctccgccacgccacgcccgcccgcccgcccggtcggcgtacatttgaacgacagcccacgcggccgcaccgagacgctggcagcccgaccgcgttccggtgctcgaagaccacgacaccacagggtagcagaacagacgcagacgtccagagccatgggcgcgcttcaactcgagcgcgcgtggcagccgtccagaccgctcgaggtgatcccgtgcagcccggacagcgcagttgatgccgaggccggcagtcaccgcagcagctacaacagcaacaacaacagcagcagcagcagcggccaggatccgagatttgactacgtcaacagccccgtgaagtgctcggccggccccgacccggccagcgacaacgtgcaccagaccggcacgcgctacagctccaacaacgccggcgacgggcctgaaaagacccgcgaccgcaagagctggttcccgcgcttcaagtccaattggctcggcaccttccgctccaagcagatgttccactgctgcgagtgcgccgtggtgccgcctgccaacggcagctcgctctcgagccaggccggccgctacaagggtgccgagggcaagcactgccgctgcggcaaggaccagtggcacctcgccaagtccgtggaggagaccgagtacaaccgccgcatggagatcagcaaggcgctcggcggcatgcgctacgacgaggctgtgctgcggttgcgcagcatgggccagtccgagctcgacttcaagccgtccaagcacatcgtcaaccctggatcgcccacgcagccgcgcagcacccgcgggtttgtccctgcatcgtcttcatcgttgtctgcgtcaagtgtcaacccgcccaagcgtgcgcgcagcgcctcaagcggaccgctcccttcggccactacgcgggcctacgcggcaccacagctgatgaagcccgagctttcgacgctgcccaccatgtcgtctcagatgtacggctacgagaacccggccaagcagtacggcacctatactccagtgtacggcaacaacggcattgagtacacgcaggctgcgcagccgcaacaccccggagagtatgagcagctcacgcaggcaccgtttggtgacgaggagggcttcggcgagctgctgcagggcattctggaggacgaccctcgagtagcagccagcgcgggcatgacactcagtccgaaccagcccggcacgtacggggcccgctacggctactacaccgcgcccccagctaacggtagcgtggcaccactgaagcgcacgatgagcatgccctcgtacgccatgacgccgtccttgatgacttcgccgcctcgcgagagcgtagcccaagactattacgcggaccccactcgccgggagagcttgaatcttggggggaaccaggcttcgacgtacgcgaactaccaccagcctgcgctgcactaccatcagcagcagcatcctgtaatgcagcaattcccgtaccaacatcagcagcaggaaccgctgtccaacatggcgacggccacttcaacttccttctcaacatgaacttttggccgctctgcagcggcgtattaaactagtaagtagttcaagtagctaacagggggggggggcgcaagatggagaagactctatgtaaatacaagcgtgccagtgtgtgcgttgtttgactgtctattggatcaccggcgttcaacctccaccagtgccattgcttatgccttcgagggcacagccacgaactcgcggctctgcgtgagcttgtcgtcgggctccagcaggaaggactccagcagagcgttgaagcgctcagcttcggaccgcacgaggtcgttgccgccctcagacatcacttccaggcgcgagtgcatgatgcgctcgctcaggtactcgctgtggaacggcggcacgaacgtgtcctgtgcaccggacaccaccaacgtcttgcacttgatgtagggcagttggccgcagtacaggtcgccaccgtcctcacgctccacttgacgcagggcctccaccgtctctgcagtaacaattaatcaggcaggtatattacatgtcagccagtacattggaatcgacctcgagttcatggcagccgacgacgcaccagcccacttttcctgcaggtccgcgccgtacttggcttcggctgcctcgcgcatctcctggggccacgagttcacgtcctcgtgctcctccatgtcctccaagtcctcgtcgctcacgaacgcctgcattacgaaaagcacgaaataggttgttctcctcagtctccagagctatccagtagctgttctagagctgcgtacgttgccgttgatgagcaccagtcgcgacacccgctccgggtacgtggccgccagcacggcgctcacgttggcgccgtggctgcagcccagcagcgagaactgctccagctccagggcgtcggccgcgcgcagcacctcctcagcgtcacgctcgagtcgtcggccgccgaactcccgctccggcagccgcgggtccacgccgaagagcgcgaagctacgcgtgagctgcgcgctggcgaactgcaggcggaagtcgcgggccacggagccgaaagcggtcggcagacatagcagcggctgctgctccgggcccacggaggtcggcgccacggcggagagcgacgcgcctgaagcgcccacgggcagttggaggctgcggaagcccgcgggggcgctggagaagcgacgcagcagcagcgggcggagcggcagcatggtggcaataatggatgagagcacaattggtaatggagcccaagcgcagtgacgcgcgattatgatgggtggagtggtaaggtaagaaaccaaattagtgcatacataataggagagcttcctggcgttggtattggggaagggagctacgtcctccagacgagcacggacacgcccgaggccacgctgaagtagacgtaggtcttgatctcgtgcgtcacgtaggcgccgaaggaggaccccacgacgcagttccagccgcggccgtactccttctccatgttgcggcgcacgaactcggcgatggtggagaaggtcttctccgactgcgcgggtcgtcgtagtatcagcagcataaacgcaggtcggcaacaaagcaagagagttgttagtggccgaacacagtgtctgaagtccggggagggggaggggggagatgcccctcgaccagcctgcacgcaccgtgacttgcagctggaaggcgtcgcgcgccgtgctcagcgccttgtcgagcatggcgtccgtcatgtcctcggcgaacacgaccgtcttgtagaacttgtcgttgctcttgcctgccatcgttggcgccctggggatcgatgcgaaagcagatatgcgtgcgccccttcgccgacacgctttctacagtcgcaaatggatgctgctcaggagaccctgagcccaacggagcaatgggctgagcaaagagctcttttcgtccttgacaacatttgtcgaaagctttcagcatttaatactgaaagcgctgttctcgtgccaacttcgctattagtccgttgccggaatcgatctgcctcaacgccaccacacttccggtcgcctcaatttcaggtcactggagtctaaatgctgccaaccttggcggcgtacaaagctttttgtcaacaggtgtactgctgaaaaacgagcggtggccattccggatcgctgacgaaaggaaggggctcatctcggtgtgggtggggtgcgaacccgctgagctggtgctgctaaggtacattgcagagcactaggaacgcgcgcagaatggttgcactgcttcgagcgccgaaggcggcagtcgaaagggaaaaaaggcaactacaacgaccttcactctgtgtgcatctttgccgtaatcacatcgacccgtcaacaggtcaacaggacgagatgacaaaatgcgcgcgggtgagaggctttgctcaggctccggcggtgattcacacccgctgcgttgcagccacggatccaggatatgattccacgcctgcctcatggatgcgtattatggaatcatcatgcttcgctacagtagtgcaaaaaggcgacttcgcatgcaaaaatgactaatttgagctggaatgacggcggttatcggcttatcgaggccaaggattggcaacgcaacaactacgcagcccgaactgccccggaaaacggtctcggccgccgagttcgtcccgcgactatcgtggccttcgtgccagcgcagcaaccgaagctgctggccttctcgatttcgtgcttcgtacgggatcggcgctggacgcgtgcccttgagttacaatcgttgctgctgcgatcacgaaaacagggtccactattatcgctggatgcgacagccctaatagcttgacttctgtaaacgagccctatattcacgccttccgccgatggatacaggtaaccgagtcggcggaacgccggtcggccgtctccgaaaagctcggctcacttccaaaactcccgtcggccgctcaagccaagtctccgcccgcccgccacgaccccgcccgcatccgcaccggcaacatgttggtcatcaccagcttccctcgccgcttcccaaccgccaacaagcggcccttacgtctgccggcgcaattgggccgcgccttgtcgacgtcgtgtgctacgcgcgacttgcctccagctgcagccgtggtggcctccgtgaggcctgcgtcccggtcctccgctccttcctccttgctattgacctcgccgttgcgcgccttgtcctcgccctctggcgctcgggccgtgcactccaaggccccgaccagccagagctccacgttcgccacctcctccgccgcgcgcgtgcacaacgaggacgaccacgagctgctacagcagcaacagcacgacgtctacgatgacagcttcctgtatggcgagcgcgccgacgactggttcaccacggcgcgcaacccgcgcacggacccgacgttccccggagtggatcgcgccaccggccgcctcaacgccatcaagatgcccgacctgcgctcgtgctcgcgtcaggagatgatcgactatttggacaactcgtgggccatgacggacgcgctgttcgccacgctgcagggccagcgcgccttcatgacgccgccgccgcaccagctccgccacccgctcatcttttactacggccaccccaccagcttctttgtcaacaagttcctcgtgtcggggctcatcgaggagcccgtgaatccctacttcgaagaggtgttcgaagtgggcgtggacgagatgagatgggacgacatgagcaagaatgagatgcactggccgcacgtggccgaagtactggtttaccgtcgccaagtttaccagctcatccgcagcgttgtggaaacccacccgggcctcgagcccggccacgagcagatcaccgagggcagcccgctctgggcgttgcagatggcgctcgagcacgagcgtatccatcacgagacgacctcgatgcttatgcttgagcacccagacgagttcttccggagcacgtcactgctgcccgactaccatgagtccctggcctacaacaacaaggaggttgcgctgcgtccggtcgctggcgtggacttccccgtgaacgaattcctcgacgtgccggccgcaacggtgcagatcggcaagccgcgtgacttcccctcgttcggatgggacaacgagtacggccaccgcgaggtgaacgtgccggcctgccgcgccaacaagttcctcgtgtccaacggcgagttctttgagtttgtgcgcgacgggggctacctggagccgtcgtactggagcaagctgggctgggagtggcgctgcttccgcaacaccaagtggccggctttctgggtgcaggacggcccctcgggcagccaccgtttcaagctgcgcgccatgtttgacgtggtgccgatgcagtggagctggcccgcccaagtgaacctgcacgaggcgcaggccttctgtaagtggaagcaagccaagcaagccgacaagaaggtggtgtatcacctcacgacggaggcagttcaccagctcatgcgtgacgccaaggaccgctcggccgacgtcacttcggacgacatcttgacgttgccggagggcaccaacatggctgatgcaaccggtaagaacctgaactggtcctacatgtccttctcgcccgtggacgcgctgcctcccacggcgcaaggcttccacgacgtcttcggcaatgcctgggagtggtgcgaggacatgttttcggcgctgcccggcttccgcgtgcacccgtactacgacgacttcagcgagccgtgcttcgacggtgaacacaacgtgatcatgggcggctcgtttgctagtgctggagacaacggtgcgtctaagttcgcgcgctaccatttccgccctcacttcttccagcacgcgggtttccgtgtcgtggagcagaaggtggatgacgatggggccatcacgttggcgacgaccgacgtgaacgcaccgccgccgtacgtgaacggaaacccgttccgctccagcgagcgcgtggtggtctccggagctgagacgaaggacgaggttgcaggaacgatctgccagggtctattcgaggaccttcgtcgcaagagcgagcaggcgctcgagtccttcgtggcctcgtcgacgtcggaaacgacgagcaagccccttgtggctcgagatggcacggtggcggctgccaagctgcggcgccaagtgaagtgcggtgagattctggtggtggtgcccagcgacgaagcgacacctgcagtgctggaagacaagttcgagttgctggcgactgcggaagtgccggtgttcacgcaggagagccctacggaggctcgggtgacagcggagactgtgactgcctggaagaagatccgagactaaggggcaaggacttgggtgcgtgtaatgtatatgcaaaagcaaatgaaattcaactattgttttcacatttgagctctgtattattattactttccatgtaatggagcatctcagtcgcgttgctccgttaagtaacgtaggggtggacagcctgcgatggagcctccactcctaagcaatccatcaatgatcatgaccatgttttgaagttattttttagggggatcctgtttcggggccgtaatgttcaattgaagcgttattcttggaacataccttgatttggaaaatatccataacgtaccctgtagcccaagtgtatcctgttgcccatgtgttaccagtaacgtatcgtgtttccgaagtgttacctatctcccactcgtactctgtagcctacgtgtagcctgtagcctaagtgtaccctgtagtccatgtgtggcttaacggagattgcgtagcgcacggagcacacggcgctgagtcgccggactcttgggtgtcgtcagcaccatccacgtcgcccgctgaagccggggtctttgtgttgtgttgcaggaattgcttcggagaactggatttcatacttctttccgcgaccacggtttggtcaggtcacgataaacattgctgagtcagcaaacagttggctgcttagtgaacgcgagggcacgtggctagggtgtcttcaaggtcttacgagaaaagttcaagagcgaaggtggcaggtgagccgtgacagcgattccatatcggggcgtttcgttccatgggtggttgcaaaggtgatgaagaacattgcattgggacgtcagcgccttatcagtccagtcagcgacacagtgatcgaagtgatgcgcgtatcagagaacacgtatgctcaagtggacatagctacacggctgtgctcatgtggattgtggacggagctgcaatacccctgtcttcatgcgtgtactgcgttacagtcggtgggtattgaccctctcaattcgatatccgagtactattctgttgagcgactccgactctgctacaaagagactgcgtttccagttgatgctggactcctgagccctggttcgactaagcctcctgtcatcaaagctacccgtggtcgtccgaagaagttgagaatgcgaaaccgttcggagtatctaaacaacgactcgcccgctcattgtagccgatgttccaagccagggcataacgtccgaaagtgcgagcggcgcgaaaaagaacggctgaagcgacagaaatctcgcgaggacgccagacagattgtcgtttgaggtagatgtatgggaacgccacacatggactacagggtacacttaggctacaggctacacgtaggctacagagtacgagtgggagataggtaacacttcggaaacacgatacgttactggtaacacatgggcaacaggatacacttgggctacagggtacgttatggatattttccaaatcaaggtatgttccaagaataacgcttcaattgaacattacggccccgaaacaggattccccctattttttaaaataataagggtccatgagtcatgtacaccatttcaaggctaaattgagagaagtagcgcttccatttgcaaaatgaaggggtaggtctgatggatatacttgcatttttaacgttaccctaaccctgatcaggccgctgttgccctggtgaatgtgaggaaattgaagccgcttccggtttacttgggttttgtatacatcttaagtcagaagcaacttccgcctctagaaacaacaaaatatgcaaatccgattgcatgactaatcatcgcgcagtatcttcggagtattaaccagtcatatttggggttggggaagttcatctcatggattgaatgaagttttgaaaagggaagtcggtaaaccggagtttccgcttcaatggtttatttcttgtcggtatgaactcagtatacttgcaatatatgttcaactccgttaagtacggaaagggaagcgcaacgaaggtgaaatagtcaacccttcgtattctcgtagcctgattggtcaacagaatagctaattaaaaaccgcgatctctctgttggaagcgctgctggtcctccagtaagagccgcgaatctacgctgagagcgcgacgagttttaagttgaatacaatttcatccaaacatccaacaaaaaaacagtcggcgtgatgaccgaccccaccgcgagatatcagctcaagaagcggaaatttgagtttcgacaagcactgtctgtacatgatgcccaagatgagcaagatgaatgatggcttgaatgaagacaagaggaagcgttgttaactctaagaatttacgaacagctgttcgtaaggttttagagttcctttgggaactgactttaacgggaagaagtgagggaagatttaacctatactggagatcagaacttaaagtttccgtcccagccctctggttggttaatccagggaaagacgaagcggtagtagttggggtctcttcgcaaaatccagaatgaccaaatgtattttccgccgctggagactcatgtaaaacggtacccaatgcgcgcgtcgtcattccgcctttgactatctgtgagctacgctaacccactactgcagcagcgggcacgcggtgattttgtcccggcgtgaatctttattctagaagcacaccggccctactcttgtctcgacacggcggaaaggctgcacgcctcgcccaggtcgttcttcatgcgctggcgtgtcgcctcggctatgactttctccgtctcgtcccccattatgatcacgctgtacagcacccgtttttgaccccgcaacgtgtctatcatgcatttcctatgcgccgagcgcgatgcagtgctcgctgccggtttgtctggggagcacttcactttggactttggccgaaatgttgcgcctgccgaacctataatgtccttcgcaggactttacaaggcttgatttttttccaacgcagtcgctgtaccgcgttcgtgaattcgtgatggtaagcatggccgctgacccgacaaactcccatcatcgcatcaaacgcactccaagagatcaatgtgcagttggggccgcttcggtgtattcggccagcgactcgccgttctggtggcgcgagctttggtcgatttcgggcggatcgaatacaactcaatgtcttaggccatgacgctcaatgatcaaattgtgctgcaaaccccgttcgcagcggccaagagctgttggccgccatccgcactgtctcacgcacgttgaagcgttgcagctcccactctcgtagtatcccggcggacatccgatccatgctcccaggccggtggtgtagagccgcacaggtttgatagtgttctcgtcacaaaaccctcttcttccatctaaatactataatgcataacgcaactcattattcgttgtgtccctgattacagaatgaacgcgctatctgtcatccgcgaccctgcttcttttgaaatgtggtccgtcctgccctaaaacgagtaagatacataaagtgtagcagcgcctgaacatgtgtggtgcggttagctccacgaattggtgggaatgttattgatgcaaaacgttacgtaccatggcaccggttgccaatattagtattcattggctctgccacaggtaggttttgcagtgacagcagaaggatcgatactcgatggcgtctgtggctgcgcagaagtcgcgccaccacgtcggtgaatccttggacatgtggccggcggtctttcctatgtaccgatttgcgtacgcttgacccccggcgtgttgccgagttcggccgtttagttatccaaaccaaacgtcggatgcgatcgagcagccggatcatgtgggggtaccagaacgcattggcgaaggcgctcaagccgctagcacctgtaggatgtcatcgtgagtgttgcatgctacctgaggttgcggtggctgaagggcaacagcgaactccagcgacaagtttgcgttggtggagctgtgagccaggcgctcgtcgtcggaaagggaccgacagtggggtagcgacaggctttgcgagctgagacgcaccggtctccggaggtcaaccgaaattcgaggatcaacaaatttgcttatacagacacgagattcgaagaggagttaaagcacacaaatctaagcatagtgaggggtgtctgggccctggcacccgcgttgttgctgatttataggacgccgaagttggaattcttgttcatgcaacttgacaacaggcccttccacaaagttctttcgaacgatttcgctaaattgcacttcagcatatgttgccgataaccttagactgatctcagcgtaacccaaggttactaaccctcaggtcttgatgaaggataacttctcaactagcgacggcgctcgacgcttaaacccacttccctgagcgcacacatggccactgccgctgcccacgagcgcgcgtaacgcacagggggagttttgaatccactcggggggtaaccctggcgtaaccctcgctgtcgagttttttctgttacaacaggacgataactcgacaaagaccgattatgtacaggttgccttcaactggaacagcatatagttgcctttgtgaaccagccttctgagcgctaggatgtgtttcagcgtgcaagtagcattgtatcgcgaaaaacttatcttcttctacataatattattatgtagaaatagataagttttttcgtttttttcatatattatatgaacgtttctgaagtattgttttggcacgagcaccttgaaattgagcggtgaatcaggcgtatgttttccatctcgatgacagaggtcaaaccggcacgaatcgattccaagctagataacgatgttacagacttattcactcctactcaggggtagtaagcattcatatgcacctacccataaaaccaaataggctgtgcatcgatactcgactcaggggcatcctccgaaatctcgcctgatcgcccgtgaaaagggcaaaaatcgattaagtacgaggcacttcccaggtttttgtccttaaaccacagaaaaggaccaaaaaagacttggcgtttgtatagagggtaatcagatccgggtaagtacgacggtgtcatctatagcaaatacagagactgaaaaagaagggtgatgatgccagtgcataacaggcaataaaacctcacatatttgagtgcctaattcggagtgttccgcatgtttctggtgcgtgtgctattgtgtagagagtcgccaagttggagcaatcgtgtggtaactttttgttataatatcgctaattttccacagaatcacgaaataaaaccttatttctcttaaatgtgtgcttgcatttgtgttgttatttacttgctgagagccgttattaggccctggtttctccgtcggtgtctgggtctggggataaaatgcaagcgagcctattggctaatctcaaatctccatcgagatttgtcggagagttaccgctcagccaagcatgtggcaaggctacgtacgtgattgtaaaattgagtatcgtgctgagaattgatctaggttttacagcttgtgatactaatcagctcgtcacatctaatacgcatctggggatattatcctccatttattctcacccccgagggggtgggaattatatgcaaatcctggggttttcctggttgggccccagatatccccagacccagacactgacggagaaaccagggccttagattgcaaaaaatactgtaaacagcgctctactacgggctttacaacgcgggtacgctaggctttggcttgtttgtgtaggcgaacttatgatagaaaaactcaactacctatgaattggtgggacagagaagtatgtgggatggcttagctggcatccatggcgaacgcacactaacacagctgcagacaagtacaagaggctgttgatacgaagccagccagccaaaggagttccccacgttagtcgtccggtctgtgagcagcgagcacttgcgtgtagcgcttggagttcatctcagcccactggtccagtgtgagcggcgcgagatccgtcaagtcctcgaaactctgcgaaacaggaagaaccatggcgctggtgtcgagcgtcccaccaacagcagcagacgtctcggcagcaatttgcacgtctttcgcaaactccacggcgcactcgagaaactgctgagtgtgcgcacggggccagtaggcaacgcgccaaaactcgcggccaggctgttccccgagtgcatccacgcggctcaaacgcacgggacgagccttgttggcgtggcgctggaaggttcgctgcacttctttcatggtcacactcacggtgtagagctctttggtcttcccgcggtgcagggggaaggtgaaggcggcagcgaccagcgccttggcagcgtcctcgagtgccatcaagtacaccctcgcagatgccagggatggctccaggagcggccacatgatgtgcgaccgaggagacgtcaacgagtctggcgattctccagcctcgtcctcgtcgcgagtttgggcgtggtctgcttccagtcccgattcaaacgcaggttcgtcgacgggaggcgcttcttgcttctcctcttccaagctgccaaggctttcactgccttcctcacagtgcgacagcgccaaaaagtactccaggaagagcggcaggcgaaggatggtgtacgagacccccgaggtcttgacgcacgactcgatctcctccagctgctcgaggatggcgctctgctgagtcgtaggcgagccaacgaagatcgaactcacaagcaccacgccccaggcattcgcgcgcactgcggcgtggacaacggcccgcaccacgtcaagacaggctcttcctcccagtcggagcggcggaatgagcagcaccacgtccagcgacgagagctgcttcagcaagtcggccatcggagacggcggcgcgccttcgagttggtagacggttggtggcagcgggactccagacgctctggttcgtccagaactacccggggccgccttgacggtgcacagcgtgactttggcctgctggagacctccgtccacgcctcgacggtgatggtggcccggaagaacagtcggaatggcgctctcgccgacctcactcggtggaattgcagtgggtgccgtgatctggctcgccacaaacttgctcacctcgaggaacagcgcctcgcccgagcccacaacgaacaactgcacttggttctgcgggttcttcccgaacagcaaagtgacgtaacgctgcagccactggcgcggagacattcgctcgcgcttcgtgagcagccgaaagttgctcgtgctgcggaatgcatcgggcaaatgcagcgagtggggctctccctgtcgcgtttgactcgtaagcgtgtcttggctgctcgtcgcatcatcactacggacttcgctctccacagcttcttcgaggaagattcgaaggccaaccgtgccttgcgctacttgctcgggcgtgtgcttttccttcatgactcgaaggaagtcggcgtcgctcaacttgcggtacttgatctcgcgtccgagcaatcccgtcaggtaatgcgccacctcattcggcgagcagctcgcaccggttcctcctgtcagtcggtactccgtttcgtacttgcgcttcgggttcgccagcacctccgcggccgcataccccacgtctcgaacggagatgcagggcacgtgcgtgtccagtccgaagcaaccgataaaccggttggcgaacagaagctcgtcgcgacagtaaagcagcgtctccatcagaagagggatccgcagcgacacacaacggccttgctcggggagtttggctcgagcatgaacctccacagcctcgtacccttccaaggcggcgacttcagtgggcgtcgcaccaacagcttcggtcggcggtcgctccttcgcgtgttcttgacgacaacgagccagcagctcgggggcggccagaatgctgctgatcacgacgagccttgagacttgctcggccgctaccgcgtcaacgacgcgcctcgaaaatcgcaccccactctctgaaagcgccgggacgagaagcacagcgtccgcattcctcacggcgcgacgcaacgagtcctccccgccctgagcgaagttgcactgcacgagatagcagttggtcgcatgcttgagccgcaggacacgcgggtccttggtgctctcgacagccgccacgagggccacggacacctgctcttgcgccgccaatacttccatcgccgagcgtccgatgcgactggtagcaccaaacaccacaatcacgcgagagcgcattagcttgcgcagttggatgcccatgctgccccgtgtttcttctcgacgccttgggcttcacgccgcaatggtaaatggtgaaatgccaacgaggttgcagttggtctcctcctttttcttcttctgggacgaggagcttggttctccatcctaactggcacatgcaacgagcacaaaaagtagtgacaatgttagcagttgaggccgagctgatgacactgcagagagagcgaccgacggcctcaagtctgcaagtggcatggccaccacgcaagtcgttcgagtcctgacagctttttatcatttttcatcgcgtcgtgtcgacggcgtcctgtactgcatgcgagtgtttcaatcttctcactgtagctctatttggatcggtagacgacacgctgcgccagccgcaccatggcatcccgctctggtgaaggagcgaactgcatggcaacctgggccgccagctctgcctggccgatggccagcgccttggaccgctcgatgcctgtgctcttctccacgagctcgctggcctgcaacgcgggacaaaaccaccattagtacatccccgaattgtccaccacaggaccgcatggatgggcacaactacgaaccatctcgatatctccctctttggagaacttccgcttggccagctctcgcagcacggggaactcctcctgcgcgagcagcagcggagccgtcgacagcccggacttgaggtcggccagcagcggcttgcccgtgttcacgccctcgtagtccaacacgtcgtcaatcaactgccgcgtttccaagaaagaacaacaagggccgttagctcatgcgacgaccatcgaagcggacaagagcgttgtattacctggaaggcgaggccgatgtggcggccgaatgcaaagcccaggtcgcagatgcgctcgtcgtgcttgcccagcacgagcgcggccttacaactgttggacatgagcgagcccgtcttgtagtagttcttacgcaggtagtactcgaacggcgtgatgtcgtcgcgggcgtccgcgttcttcatctgcatgacctcgcccttcaccaggtgctcgatcgatgtggacatgagctcgacggcctccaggttgcgcagtcgtgccagtgacacggaagaacgcgcaagcagaaagtcgccagccagcacagccatcttgccgccgaacaccttgttcacagacggccggccacggcgcgtgtcggcctcgtcaatgacgtcgtcgtgcatcagactggccgtgtggatcatctcactgcagcaactcagagagtcagtaccaacatctaatagcgcagttttaagcgacaacgtacgtgatctcggcgagacgctgctgtgcggcgcgcgtgtactcctccgactgggtctcaggcagcggggcgccagtggcgcggcggtgggcctcggcagtgcgcgccaccagcagcaccatggtggggcgcaccttcttgccaccgtcgtgctcgaagaagtagcgggcaaccgcctccagcaccgggtggtccgagccgaggatgcgcttgatgctctccgtgacgctcaccatgtcctgctccacgagcgtgaaggggtcggccagcgtgctcgggtccgtcggcaggtaggccaggggcacctccatctcactcacggacctgcagtagcaacgtcatcaatggttagctctatggtgtatcaattgcagtggtagcagaggcgtctgacgcacttgtcaaagtcgaggctcaggtcgcgatgcacctcggggctgctgcccgcaagcgcgtagcccggcgccgggtgcaggatggagaccgtgggctcgtcctacatacacatacagcgcacgcaaagctgcagtggttagagcattggcacgcaggcagcagactaagacagccgatcaaaacgcaccacggcggaggcgctgagccacaggttcgggttggactcgaggtccgagcggatcttgccggccatgacgcgcacggcctgctcgcgcagactgctcatgtggcgcgcctgggtcgcgagggccgcgccgcgacggaggaggagcttcatctcggggtacgggggctagcacgctgctggaccgcagactttgtgacgcactactgtattgctcggcggttgtcagccgccagcttggttcaaatactacgggtcgcggcaaggtttgcctttacccgtacccttatcgaggcaactacatacaaatcaccatacaaatgtgtaatcattttgcaacgtattgactggaagcgtaggcaaaaaaactgaagtgagtccaacgtgaggcgatggctacagtctcagttcgcgtcgtttcgtgcgcactcgccggcatggccgccagaaggaccttcgcgtcgctgctggacgagaatcggaagctgcgcgcacagctgaagagctttgacgaggcgcgaaggcatgctgagcaacaggtcgcagagttccgcggccgactgcaccaggctgaagcggcggcgacgcagcagctgaggcggaaggaggcggagtggatggccgagtacgaccgcggcgtgcaggcgctgctgaagatcgtccagcatcacgagagtgaaacagcgcagttaaaggcggaagtggagaagctgcgaactgcggcggcggttgttccgccctcgatcaccaagatgacaagggccactcagacagagagtgctaggccggtaagagccacgccaagaaggaacagtgtacgcttcgcaccaaatgaagactgtgcagtaacagataaagaggaagtcgatccaagaacgaaaatcaagatcgcgcgcatgcaggtgaattcggtatgacggtgctgttcgatgtgggtaatggctaacattttggcgtgggcgtatgctccattgtgaaattgtagcatttgtttgagcagctccaactatcacaggagtatcgcaacgacaaaacagcacatgcaagcgcaaagtgcgtagacgctgggctaatacgagatcgtggcgagcatggcccgcgtcattgcgtgaaggacgcgatcttaaggcgactacgcgcgcatcaaatgagccctcacgaaaacaacagcagcaatagcaaaactactgagactcagacagaggaaatacccgttttggcatcgtctgcaaagcttcaacaggacttggaagaccgcaatcgactacttcacgagcgactgacatcgcaacaaaacatgctggaccagttgctacacacaaagctgacacatgcaaacgccagctcggcgaagcgtgaacggggtcctgtactaaacacaccagcagatatgtccgttgttatacacggctgcgcagacgaagatcaatgtaaaacatcagacaaggctgaactttctgttcctatggtggatttatcaggatacctcgctccaagcattgccgtacatatcgagcctatcgtgaccgagcgacgccctttgtctcccccagctgcgtaaatatctaacgtatgatatattgcatcgaattacttgtcttttagtgaagtatcgtcgtgcatccactcgtcgagcttcttcacttccatctcgagatacagcatctcgtcgccactacgattctgcagcgggatggcaaacgattttcgagcctgatcattccagtcggcagggcactggttgtcgatcgccgccatgatattcgctcgttcagcaaaccaacgctgctctgactcctccagcacctcgctgtacgtattccccatcctgtccatccgcaaagagcgatgttagtcatctgaggcggatcagctccgttatacacacaatagtagtagctcgcgtacatggctatgagtagattcacgaggatgatcatcaccaggataacgtagcacagcaccagcacttgcgtgaacgcgttcattcttccacctgatccgtagttgtcgtcatagttcacctcacccgtgaagcccatgactagcagcgttcgcatccgcacaaacaatgcgtgtggaccaactcgaccgtcgtgtacaacgtagatcgcctgggagaatccgatcaaaaccgcgctgtaaactagtaaaaagcgtacgacgtcgttggcaatcatccgtaggatcatgatgacaaacggtccagtcgttcggaatcccagcaggaagaaaaacaagtagaaccacgcaaatatgagcgcgacagctccgagggcgtctcccacttcttgctgatgtgcaagccgcgcagcggtagacgcgaaaagcgataagcttgtgaccatggtgcagacattgtcgagtcgaccagcgcctccttcggtgatatatccctggaagttaagcacgatttggttgctttcgtttgagaacttcagtgccgccagcacaagcgcccccacttcagcaaagcccaaccccaccgcctcaccactcgaaccatcggtgtatttgctgtacggagtgagtgttgttgcattgagcaggattaggaatatagtgtagatggccagacgccaaaggaagcgctgccttccgacgtatttccacttcttgtgcagaagctgctgaatctctagcattttcagcatttcaaggcgcctcgacacgacttcttccatggcaacgtggtggtctggcagtgtgctcgagattttctcggtagagcagaggcactggatggcggtgcggtagccttttcgtcccttcggtgccaaagggtacggtagcgacgctaccaagtcgtgaactcgttgaatgcgtccaagatcaggagctggtcgcaattccggctgctccaggtcgaacaagggcacgtgaaacgcagtgatcggaccgtagcgccacgcgacagctgaggagtggtgaaataggtgctggaacatgcgctgctggccgatggccgcggcgagtgatagcggcgtcagctcgtccgagttccgctgcatcaggaagtggatcatttgtgtgtatccttcgtcgcttgcactcttgaggaacgcgacgagattgatttcgccctcctgaaagttgtcagacggagtaaagggttcttctacaggcgacggcgaacgcgatggtttctccacgacaaccatattctccacttcttgcacgtcgtcaatcggcttctcctcaggaatcgtcgggccgactttgctcggactgaaccgctttcctgcggtagatagcaacctcatgacataccgcagcgcgaagtcgtagacgtcgggcaggtctcggatcactgcgagatgcagcacattgttcccgtgcctgtcacacgtgaagatggacgcgagcgcctctgtatcgtcctctttaagcggcccctcttgcagtcgctgggccgcgtccaggatgtgcagcgccatgtcgatctggttggaggcgagcgcgaagagcagcggcgtgcccccgaagtagcaggccttggttggcccgaagaacttgcccgtggtctccgcacgcaccagctgcggcgcttgttgcacgagccacagcacgagctgcgtctggcggtggataatggcgatgtgcaggatgttctcgccctcgtacggcgacggttcgtggtcgttccccgatgtgtacgtgagcgcggcgagcgaccggcagcgcagcacgatgcgcttgcccagctcgtagtggccgaagaggaacgcgatgtggactggtgcggcccccaccgagtcgcgcagcgtcaggcactgctcgtccgcgtcgatcaagcgcagcgccgactccacgtcgttggcgcgcacggcccggaagatcccgtcgtcgtggtccagcacctgctgcgctacgacgtccaccttggccttggcggcgctgcgcagccagtagaggcggctggacagccggcggcgcggcttggcgcgcataacgcgccgccccgccgtcattgtgcaatgcaagtgtgtgtgtagccatctcatggcgtcgcttcaacttggcggattgtgtgcaccacaccaatgtggtggtgtaagctacggtacgggcgcacttcgtggacggcaggacttcaaacaccgcgtcaagcgccatcgagcaaggtaaggtggacggcgctgcggccctgcgtggatcgctgcggtctactggtactcacggtgattgctattgtatggtgtggttgtcttctgcgcagagcgacacaatgcaggaccagcagcagcagcagaagcctccgtcgttcccgaacctgcccaagagcgcctgtacgtctgtctccaagcttttcgactgtggctggctgtgcatcgtgatatgctaacagtatacttgttgctgttgctgttgttcctgttgctgttgcagtgttctcgaagctcgaagcgttcctgcctgtgatggccgaagagaacaagaagctgagcgaggcggtggcagcgggcgagggcgccaagcacaacatcgaagtggaggaggccgaggagcagaacagcgaagatgcagacgacgcgatgacgggcagcgacgacaagaagcaggaggacgccaaggcgcccgtgatcgagatggtgcgtgcgtaattccattgcagagcattgcgctgtggagactgacggttgcgttgtgtctgtttgataatgatgacagaactttgcgctgggtacgatggacgagaacgacagcgacggtgaagacgccgatgccgccgacacagaggcacagatcaaggccgcgacgaccgcaacagtaattggcgcgagcgcagggtcgaagcagcagcaagaggaggagaactcatcattccagatgcgaatcgaaaagccgagcaacaagccgcgcccggtgatccaggagctgaattgacgcgggatcaggcggaggtagaggaaggcacaggccattttgctggagatatttactacacgagaggaggcggagcgtctcgctgcgctgcataaagtgaatgatacacgctgaagtgcatacttacatacacaccagtactcggcatcgttgcgtttgatacccagcctgttgaagcaaaagtgaagcgccccgcagctcaccgaaaggctgtcagaagcggggcacccgagcatcctgccttgtcaataaatacgcgccgagcctcttcttttgtcgaaaacgcaccgccgcaatggccaataatccccttcgatcttctgcgcggctccgcatatggagatttgtatggcagccgcaggtctttgcaactttgaccgtggccccagaagcgaggggggccctggcctggtggttcatgccggccgcagtctccaaaagccaccgctaccgcgagttcctcaacgccccgcaccatgttctaccagctctcgcagaagctctccaagggccccatgatggccgtcggcatctcgtccatcctgggcgtggcctacaccaccttcgccttcttccgctacactggtgcgacctccagcacgcaaatgtgtcaatggcccacaccttcaggttgactgacgatcctctgccgcttattgccaatgtattgcaggcccggaccttggcggcgacgtgcccggctcgcccaagaccacctcggccgagtggcaggcggcctccgtggagtacggcaaggcgcagaaggccaaccccatccgccacttcaaggactaagtacagaaagcagcagtcgagccgtgcgtgtgcgtgtctgccgaggcctgcgtcggccctcctcctcctgtaattattggccgcgaggcgggcgtgcggctgacgggggatggagctagcaagccgcttggacgtcggacggaccatagcgactggccgtggccaagtgacttggcgactcgcgctccccgcagcgggtcaatacgcaagaataaagaaaaaatgcagaaaaaaaatcaacgaacttccccgcggacgattcgccctcaaatagtatcggttgagaaccgttctggcaggacttttcaggtcgtggtggcgcgtgtcaaccacaccaacaggcggaaccaccagcaccgattgcaatgatacgacatactgtaatcccaacgccgactagcgaatccatcaaggctgaaaactgtttcgttatgctggagcctatggacgtcttcaatgtgtgggcacgccctgcacaggtgatacatgcacacgttatcgttagcaagttccagtggtgcgtgccgcctcgacaaatgatccgctagtggttcgtaccaactctgcaacttgagctttgcgcttggcctccgcggcgtcccagccgtccatggcgcgctgtcttaatctctcctccgcctcctgctcgtccttcagctgctgttcatcctcgtcatcgcggtagccgtagtagtccggctcaatgtgcttgtacatgtcttgccgagtgcgcttgcgtggctcgggctcctccttctcgaacagctcgcgcactcctgggagattcatggcggcgccgaagtacttgtagccgccgaccccgctcaccgccgacccgtccgcgtcatatgcctgcggctgcgtgcgcgcgtagtccgggccgcccaactgcacgatccgccgctcccagtgccgcttctcgcgaatgcgcttgttgatctcgtcgttcagatcgcgaatcacgtgctcgctcgagccagctgcagcaatcgcacaagtcgacaccaatacaagggaggtttgtcttttagccagagttcctccgtctcacggagcaatgtagtgcaatgcaactcaagcaagcaagcagcgcaccattctggatgtccgccaccttcttggagatctcgcggatgatctggcgccgccaacgctcagcgtccttgaggttgtcgcactgcgaggccaggtacgggcgtcggctgcagcggcaacaacaacctaagcgttagcaggtctgcaggcgacaaggatatgcacaaccgacagactccgcgccagccatcgggggggggggggggcggggccgtcgtcactcacttcttgaaggtgtccgcgaagtcctgcttcatggacgtccatcggttcagcagcgactgcgccttctcctcattgcgcgccatcctgctcctcttgcctggtgctgggtcttattactgctgcgtggtgtagcgcacacagttccaatttaacagcgactttcagccaatcacgcaggttcaaccaacatggggcgcggaaggacgccacttcaccttcactctcgaccccgtaacgcgagaccgaccatgatggggctctggacgacggcgacccgcacgcgcgccgccgccgcatctgccggctgggccgggcgccgcctgtcgacgcaggcgatcaagccgcaggtggccgcgtacgatctggtggtgatcggcagcggcccgtccgccacgcagtgcgcgctcgagtcggccaagcgcggcaagaaggtggccatcgtggacaagaagacgtcactgggcggcgtgtgcgtgcacacgggcaccatcccgtccaagacgttccgcgaggccgtgctgcacctgtcgggctaccggcaccacggcttctacggcaagtcgtacagcatgaagacggtcacgatcgaggacattctgtaccgcgtgcagcgcgtcgtgcgctccgaggaggacgtggtgcgcgcgcagctcaaggccgcgcgcgtggacgtcatcccgggcttcgcgcgcttcgagagcgagcacgagatctcggtcgtgcgcgacgaggccgacgccaagcgcagcagcagcaacagcagcagcaacctggactcgctctcgcgcgtcatggccgacaagttcctcatcgcgtgcggcaccaggcccgcgcacaacccgctcgtgcccatcgacggaaaggtcatcatcgacagcgaccagatcctcagccgcgacatgcaccagctgccgcgctcgctcatcgtcatgggagcgggcgtcatcggcatggagtacgcctccatggtcaacgtcgtgcccggccactcggtcacggtggtggacggccggcccgacgtgagtggatcaatacttcctgtagttgcgatgaaggttttggtggctgactgaagaatggatattgtctgcagatcctgtccttctgcgaccgcgagatcatcagcaatctcacgtacgagatgcagagcaacggagcgcgcttcctgctgggcgagaccgtcaagaaagttgaggtatggagtgcaatgactggaggaagtgagggaggagcttgggttctaacgtgtccctgttggtaaatgattgcagacgacggagaaccgcgtgaaggtcttcttcgatagtggcaaggttcttagcgccgacgctctgctgtacaccgttggccgtcaggcgagcacggacggactgaacctcgaggcggtggggctttcgcgcaaccaccgcggccttatcaacgtgaaccagaactatcagaccgaccagccccacatgtaagctcggatggcgctttctgcaccttgtccttgtagtgagtctaactgctgcattgtttctcttccactagttacgctgcgggtgactgcatcggtgccccggccctggcgtcgacgagtatggagcaaggtcgcttggcgtcctgccacatgtggaaccctgacgaagagctcaaagtgacgagccagttggacaatggcaactatccgtacggcatctacacgatccccgagatctcgatggtcggccaaacggagcaacagcttacgaaggattgcgtgaactacgaagttggtatcgccaagtactcagaattggctaagggccagatgatgggtgcgatggctggcggcacgctcaagatcctgttcgacccggacacactgaagctgtttggagtgcatgccattggagagggcgcgacggagattatccacattggccaggttgcgatggcgatgggatgctccctaacgtacttccgcgatgcggtgttcaactacccgacacttgctgaagcctaccgtgttgccgccttgaacggactgggacgtctgagtcgcaacgctggtgagcactagttgcaaatgcaaaataccttgttggggtggcgatggcatgcggaaatactccttatcgaaaagctgcattgactcgccctcacgctgaagcctatcgcgtcgatccagatagaatgtgcaaacaaaataaatcgggtgtattgcctgtagcaaaagaggttgcgaggcgtgacaagatgacactatactcattcgtcactgtcactgtaagtgcattagaacagattgggacccgatattcttcatctatctaacgaggggggggggggggggcaatatctaaccgcactgcagcaacaccgacagcggaacatgtttggaatttgccgagtcaagaagctggaattcgtctgagctgagacccgtgcgaacctccatttcgtcctctgcgtagggcaaaatgaccgcgtatggtggagttagatcatttgctgctgtcgaaacacgctcaattcggtacagatacaactggatgccgacgaaacggaggctacagaagttccacggatccgtcatcattgcgatgttcatgaggtgaagaatcgagtgcgactccgttgtgcgcgagcacagatcccctttaggcgatttcgccttcggtacactcgatgcggttagcttacccctccacacgttccacggataaatacttgatcgacgcggtgaaacatccacttcattcgtgatggtctggaacggttctgctacgttgcgggatgctggtgatggagcaactcttaccagtttgctcatcgttgaatgcctcgaccaggagttgggttgtgagcgaattggtacgctgaagtggatgattggagacgtgttcacccaaagactctcgattccgcacggagcaactcgtgacagttttaagatcactccgcgtgttgtgcggtatggcaaactggttcgaggtgtgaagtatcccaataacttgataatgagagcaaggacagcgaccgcggcgacacacaagcgaaccgtcctcgagctgccaccgtaaaagtacgaggatgaattaaagcagccgtcggggttggacgaccgcacgaagtccattatttgcccttcgttggggatttcgatgacactcgtgatattcatatcgcgatagcgaacgtttttgtatggaccaaagactgtcaaggaagacgtgaagctgatgagcagtcctcgaacccccgggattccgtcggcgtgactccttgccctcctcatggcaaacaacaccacactggcgagcaacgccaccaaccagactgcgcgcatttggacggcagtagtttgtagaaatggcacgagtttgaagttgactgcgccccccacagacgcccaatacgagtcgaggaagatgtccatgaagctgctgtcgaggaccagagctaagacgtacccagccacaggcagcaaactcgagtacacgatgacctggaacgggatcttgaacacgatcaacgcggtggacaccaaacgatgcgcagtagtgccagctcctgacccctccgccgcgacgtaggcaccgtagaccagcaagatcaatcggacccagacataagcctgcgcactgcctcgcagcatcgagatgatactgtaccagtccaggagattggtctggacgatgtcgcgctcgtatcggtagtcgtccacgaagacggtcgtgcatgcagcggcaattgatgaagaattggtggtgttggagcagcgtattcctcgggtgaggatgacgatctctagtgcctcgtagttgtagaaggtggagcgcatggcacccgaggtggatgaaagtctctgcgaggacaccaaagccacttccatctccaggtctgggtagcgctgctgaagtgactgcagtcgcagatccatgtgaccccagagccgaacggggggcgacgacgtgttcaacgggtcagagcacttccaaatgcctgggtggttgcagaaccgtggcctcggcggtgcacggtggccgatggcagcattggcgcatacgcggagagacttggtgtctcgcgtcacggtcgggacgtgcagtgagtgtaatctccaggcggcgttcttggaagctccgcgcacgacgtagtggtgcaagcgatcgacccaattgtgcttggtggcgtagcgcagcgctctggctgttggtcgcagctccttattcgctgctccgatgaacgcgtcgagcattgtgaaggcggtggccaaatcgagcatgctggatgcattggtctcgggttgatctggttgaggcttgtatagtaagaagggtgggaactcagtcacgttcagcagctcgacggcaccgcgaagcccgacggaggtggtgtcgtactggtacgaccagactcgagctgccggaatgggctgcgtgcccttgagtccaaagaaggatgcaggttgggagctgtcgttgtcgaggcggtggatgtgcacgaccgggtagttgaagggtccgaagcggacggcggtgccgggcatgagcggcaccgggtaatagtcctgcaagttgtgtacgccgaggccagtgcgagggatgtcggtcatgagcaaaacgagtgacacgagggtgatgacgcatcggagtttgcacaaagcgatgcagttgctgatatccgaggggggcaggaggtgctgccattcatttgttctcgttcgggcaagtgtggaagcgcttcggtttgtgtcgaaatcgttgtcctcattctctggagcgcaagtgtgtgggtctgcacacattgctctctacacgcacacgtaggtgcttcatcagcattcgaggggcatgggggggggggggggctaaaagtgtttggggctggaatagtgtggtaacggacgatgctggtcattcatttccgctgtgacaaagctgcgtgataccctttcacgaaaagggtcattcaccaatgaatgcccccaaatcaatgtcgaaatggggccgtcttgagagttggcgggagggatccaggaactcaaactcgccagcatccaactcttctgtttcgtcttcggatatggtaaagtacgcgcgagttcctactagtagcattggtatcgggcggcgaggtacaattggaggccgaaatttgatttcacgcagcgcacttcatgagtttgcgaagcagagcaaaacctcgctgtattctatgcgttgcaatgggtgtctacattttctagctgacgacggcagcccgataaataatgaatgtacataccagtctacggctgccgtcagccgctttgcagcaagactgccattgggatatccctggagctcgcggagtcgagaagttgaaagtcttcagccccaaggcccgcgtactcttccatctcgtcagcatcgtagggcaaaatgacggtgtagaattgaggtcttctactcgtcgcgtggatgtctaaagagatggctcgggtccgatacaagtacaaggggacgcccaacacccgcagccagaagaaattccacgggtccgtgaacatggcgacgttcatgagctgcaggacggagcggaactcggtggagctgtagtcctcttcagcaagcaggtgtcttctagaggtggtcctccacgaagcaactctcggtaatatctgcgcggtattgaatggcctcaccttggtctgcacgcccgagctctccctttccaagggcaagttggcgcttgatggtgacgctgttcgcggcgagccttgcgccttcgatctgaccggcacgcgagaggttgggacgaaaaattgaatgctcagcaccgaagttacccaaagtcggtgggccccgcacggcatcatgggtgtggtgctcaaaatgagccccttgctttgactttgtcgggaggccaaatagcatgcagccttgatggccaccgctagccacacgacagcgttgatgcagaacatcaacatgacagcgctgtcgtcgaagaaatagttcgagatgttgtagtgacccacaggattgctgcggacgatgtccattacctttccttcgtccgcgatctcgaacaagttagtgatgttggtgtctctccacgtggttttcttgtacggaccgaagaccgtcagagttgacgtgaagcaaatgacgagaccccgcacggcaggaatgccgtctccccagtaatctcgactcctcctcactccgaacacggccagactcacgagcaccgacaagagccaaacgttccgcatctggacggctgtagatttcaagaacgagaacagtccgatgttgattgaaccccccactgccgcccagaacgagtcgaggaagaggtccatgaagctgctgtccagcagaagcgcgatcacatagccgctcaccggcagcaagctggaatacacgaccacctcgaacgggatcttgaacaggatgaggatggctgctactggcaccgaatcggacgttttcttagcagcaacaagctgcccagcgacggcgtaggcgccatacactagcaagatcaagcgaagccacacataggcttgcgctccacctcggaggaaggcaatgacactataccagtcgacgagattggtctggacgcggtcgctctcatagcggtagtcgtctacgaagagagttgtgcaagtggacgggttggtgccgacgcagcgtctgcctctcgtgagaacaacgacttccagcgcttcgtagctgtagtacgtggactgcagcactcccgttgtggcggatagtctttgagacgatagcaacaccacatccagcgccaggtccgggtattgctgtttgagcgcttggaatcgcagatccatgtgctcccatagacgaactgcaggcagcgacgcgttcagcggatggctgactctccaaatacctgggtggttgcagaagcgagggcgaagcggatggcgctgctttgctctgttcgcgactgtattggagcatattgagagagactgcgtcgcgctggtgatgcgagggatgtggagcgagtgcagtctccaggcggcgttcttggaagctccgcgcacgacgtagtggtggatgcgatcgacccagttgtgcttggtggcgaatcgaagtatagcagattcattgcctactgggagcagtttactacgtgcagccgtcatgaaggcgtccagcatggtgaatgtggtagccaagtcgatgagactctcggcgtctttctccggttcgccctctctcggctggtagagcaagtaacctggatactccgtcacgttcagcagatctaccgctccacggaacccgacagagagcgtgtcgtactggtacggccagacccgagcccccgaaacgggttgagtgcccttgagtcctacgaattccgttccggaccgccaggcgtgtataatggggtagtcgtaaggtccgaagcgaacggcagtgccaggcatgagctggagcgggtagaattcctgcagactttgaactccgagccccgttcgtgggatgtcggtcagcagtagaacgagcgacacgagcgagaagacgcatcggaatttggacagcgcgacgtacttgctgatgtctggttgggtgaggagttcctgccacccgctcgtcctggcccatgtttgggttctagcgctgtcgttccgatcgtctcggccttggtcttcggtggtgggagtgcgcgggttcccgcacggtgctgggtgaatgatggccatgctagacgaatacctggctgtgaagtgagcgattcatgccgagcgtagggtagagtagagctgagctatatcaacttcatagctggaaaactgaaatacgcctccacgtttagctttgccgttctggaactgtgacgtacttgcgagtcctggatgagtcaaggtgtattttggagttaatcgccttgattcagccgctttgaagcagtgtggacattgggaggtcctttgagctcagagaatccacgagtcggaagtcgctagaactgagtcccgtgcgctcctccatttcgtcttcagagtacggtaaaatcatagcgtacggcaagaggacagagctgctatcaagagaggaacacgacaagagagcaggtcgaatccggtacaagtgcaagttgattcccagcactcgaagccagaacaaattcaacgggtccgtcatcatggcgatgttcatgagctgcagaatcgagtgcgagtgcgccgtacgtgaagccaagccgccggttggaagtagcagcaagctccgagcatttggtgaaattcgcttcctacggtagggacaccacggacgccattccgacgagcgcatagtagtcgggtgtaccatgttcactggaggcggtggatgcagcgctgaggctggagcgggcttaggatctggagaaattttggccaagctcggtcgactctgaaggtctgtgtgtagctggtaaggtgtggagctggtcaacgcgttgaaccgaacgctcaacgacgaggttggccagaggagctccgacccaatggggacgcccagggtcgagatcaaaaccacctcttgatcttctcgcataatgaagccgaccagtcgagcagcactcgctagcactgctacagcaccaacacaaaccatgagcatggtggagctatcgtcacacaaatacgtggactcgttaaagtatcgctgagggccggtcagcactgaatccatgcgttggccgacaacgggaagtcgaatcgcagttaagatctcggtgctccggaacgcggggtgtctgtatggcccgatgatcgccagtgccgaagtgaagctgatcgctaggccgcgaataccaggaagtttttcctcggacccactaatcggttttctcgccacaagaaccatcacgtccacaagtaaagccatcaaccacacggacctcatctgagtcactgccaagtttaagaacggcaggagtttgatgctcatcacgccttccagcgtcgaccagtacgagtcgagataaatgtccattaagttgccatccagcaagagcgccaatacatagccaactacaggcaacagactgctgtaaacgacaacctggaaggggattttaaacacgctcagagcagcagatacaccacgagaataccagggcgattcctccagtttttcgaccttctcagcagctatgtaggcaccacgatagaggagacccaaccttacccagaagtatccctgagcccctgcccgcatcatcgcaatgaagaaataccagtccacaacgttcgtctcgagcatctcgcgctcgtatcggtagtcgtcgacaaataccgtcgtacattcactgtccacaatggtatcgttacctgtgcagcgtcgacctcgagttagcatgacaatctcctggtcctcgcagttgaagaacgtgtagctcagcgttcctgaagtcatggacggcctgtgggtggagatcagcgcggcatcaaggaccagatctggataccgtcgctggagctcctggaagcgaatgtccatttgatcagcgagacaaaccgcagggagcgacgcgttcacagggtgagcgcacttccagatacctggatacgagcagaatcgagggtgaagtggctccctcttgtcggtggtggctgtacacggtcgaaagaagttaacgtgacgagatattagcgggacgtgcagcgtgtggaggctccacactccgtggggcttgacaaaccgagtcaagtactggtaaactcgatcgatccacttgtgcttcgtcgcgaagcgcagtacagttgacgacttttctcgcagtaaatccgctcgagctgtcgagatgagggtgtctagcatgaagaatgtggtgttgagggctaagatgccgctctggttgctcttctttccccactcccctttgtacagcagtgactctgggaaagccgtgacatttagcagctcgatagcaccccgcagacctacagaggtagtatcgtacttgtaggaccacacgtttgctgagtcgacagggtcttctccctcaagtccgtagaattcgtcgatcccgctgatctcatcgctctttcgccaaatgtgtcgaacaggatagtcgtagggcccaaagcgagcgacagtatctggcatgatagttgtctggtagtagtcccctagacgacgcactccgaggccggagcgagggatgtccgtggcaagcagagcgatggaaatgatagagatcacgcaacgcagcttggagaacgcgaggcagccgtcgatgtcgggacgaagcagaagtttgtgccagtcttccgcccttgtgcgcgtagagctcctactcccgcggaccattgggctcttcttcttgtccttcttcttcttgacctcccagtctagtgccttgatcctgaccctgttcatgctcctcagagggttttggtggagtgttcagtgtagtttcttttagaccgagggtcctcgatgtgctgctataagtgaccacgtcagcaaaacagaacacaagtgcgattgagagacacttgcttgtgcataataaacatatccttccaacactctgtgccaatactgcggcctcagagctcaatgtgctgcgttctctccccagtgcggtgtaccagcgtcatactttccacgcggaacgcgtccatggttggcggatcggcgcccgtggtcttcgcaggcaccagcatcttcttgtacacgaggtccgggtagtccgcgctggttttcagcgccacgtacctctccgcggtcgtggtcccaggctcaaagtattccgcgcgctgcgtggggaagatgaggatgacgaatgtgacggcgacgagcgccatgcagcccacgaacgagatccagaacgagttggctgggatggacatggcgatgcggcggagctggcgatcgcctttgagctgcacgttcgccaaaagatccgacgatgtggacgatttcgtagtggacgacgaggatgaggaagagctgaggtccgtcactgctgcgttctgcatgaagaagaagaagacggacgagtacatgacctccagcggccgctccagggagtacttgttgtcctccagctgggccagatacgactccatcagggacgagcatgcatccctcgtgagcatctcgttcaagctcgcgttccactgcgtactcgcgaagttgtcgaggttcaagtactccagctccgtcggcgtgccttgaatgaggacggacggcgcgttcagctgcaccagcggcgtgggggagtggaagtccccggccatgatgtcgtccacagggaggacgtcggttccagcgaacaggtagcgcttggtttggggcagctggtaccacatgccgttgcagtcgcctccgtcctcgccgctcacgtcacactgcgcgtcaaagtcctgatgcacggggtccgtcttccaactaagcagcgcaaagctgaactggatgtgacgtcgagggttgacgacgtacggccccacgtacatgtccacgctctctccaaagacctcgtactccccgtcaatcccgccgtacgcgaacgtgtcccccgcaatgtacgagccgatgccgtagaccacggcctggttcgggagcttctcgcactcgacggggtaccaaccaccgtagttggcgtcgtagttgatcccagtgcagttgtccacaaccgggatgacccccacctccttctgcaggttgaacgtgttgctcgtgtcgaagaagaggcacgacgtgttgccgcagaagctcgtgctgtagtagctccacacgtagtcggggacgaagctcgcgttcgttgttgcgctgccgttcgacgaggagccgcaggcctcgtagaagtagcacgcggcgtcctcgaacgtctggccgtagacgacggaggcgttgagcacgacgtcgatcgtcagcgcctggatgctcatttgatccgtgaggctcagcttctccatcgacagagtcgtctcgtccagcgcgaaggtgctggggaacgacttgttgagaccctcagtgacgagattcatgaccgagtcgatggagacctgtccacggcctccatgagcttgaacagcgacgtcgcggggccctggcagatcctcgtcccgtcctcagcgtacgtccacgcgcccgtgctggtgctggagtcgttggggaacgtgtcgaggtccgtccgaccgtccgactcggaacagttgtgctggcgccgctcggagttggcgatggcgcgctccatcatgacggtcccgtgcaggaagaggttgacgacgtcgacgatgtcgaaggcctcgggccagtccgcgctgccctgcgcctccgcgtacgtgacggagtagtcggcgtcgggcgtcttgttcatgaagttgacctccgtgttccactcgttcgagtagaagccgtagacgacggcgatggatgcgaggtcgtccacgttgatcggcgccaggctctcgcccgcgtacgtgacgctcgagttctgctgggtgcacgtcgggctcgagatgaagctgaagggggtcgtctcctgccgcaccgcgttcttgaggatggtgtcgctggggcggcggatatcgagcttggactcgttcttgagcgccgcggcctgcagcttctcgatggtcgactgggacttctggaagtcgtcgaggatcatggtcgagttgtagcccaccgtgctgttggaggcctggaagccgcggatgctgttgcccagcgttagcacgaccacgatcgggacgacgaacaggacgacggatcggacccgaccgaccactttgctgggcgccgagacctccttggacgaccagagcaggttgtgcaggaacacgatgtaggccggctggatcttgtcgagccaccagcccatgacgacctccacgaaggccatgacgagccccgagcggaagttgtacgtgtccgtcttcttgtcggcgttggtggacgaccccaccttgtcgtacacggtctccggtagagtgatgccccagagcgcgacccccgtgaaggccccgacgaacaggcagagcacggcgacgtggaaggccaaacgtgccggggacagcgtgatctcgagcgctggagagctcctctccagcttgtcctcgagcagcgcgatgtccacgggcttttcgacgtcgatgatgtcctccttcttcgacatgggtgcgagtagtgaggtggcaaaggtgaaggtgctgcgttcgacgcctttcgcgttgtgagcgatcgagcggctggcgcgtgttgcgttgcgtccggctggcgaagcgagcggctttgtgggtacagactgcaagagttcaatgcagccattgtcacgcttgtaacattgcgtcggcttcaatgccaaacggtagaaaaccagcagaaaaactactgtacacaacaggttgtagcctttggcgtccgctgcagacacttgatggtttcctgcgtggtttcggatgaaacttgcaacgcacaactccatcaactacgacgcgatctcggattgaagagcgcccaactcacgcgtgcaattttgaagaacccccttgtgctgtttcatgacaacccaacgttgtagaaccaacttcggacgtcctcccacatcggtgaggctccgaaggcaatggagcgataaccttggtttattttaaaaactgcatgcgccgcaccgtccgcaatgaacagtacatgagcgtcccagaactccacgcccccctgcaatgttttgtacccttacaccttactgctgttagagtgcaagtttttgcttttcgagttcagcgctgcatccgtttcgccatctgattgacttggtgatatatcaccccgaagtcaaagtcgcttgacaatggctacatgcgctgctcattgtgtacctgccagccgacggccattggcaattcagaggcgtggggcacacaacactcaaacaaacgcgctggttgagactgagacggctcccaaagacacaaaagcatggacgtgcagtcaccgtccgaagcgtacgcgtccgtgaacaccccaacgaagaacctcccgggggaccacgactatgagaatgacaaggacaatctcaacagcttggcgctcctccgcagcgacacgctgctcaatggagagcacgtggagccggacgtgaagctgcgagccctgcccttcctggccatcgtgctgctcagcaacggggcgctcatcggcttcatggccatcttcctgtccgaggtgaccatgggctccaagatcagcgacacggtcgggtcctccaagaacgcggacaagaaggtcgagacgtaccagttgctcaatggctacatatccgctgctgccggggagctgctcaacttcgccttcttcgtcttcctggccgtcatggtcacgtacttgggcaacctgccgtggcacccgggccagaacgtcgtggacggccggggcaacgtcaagaaggccgtgctctggtggttcacccccttcgtcatgtacgtcgtcaacgtggggatcacgtccatgaacatcaagcacacgatcgtcggcgtcgagcacattttcgtgcagagcgacctcatcacgtcggtgctcggactcacggacgccgcggacgccactgacgtgcagaacaccatcttgaggactgcggtgcgccaggaggtcgtgcccttcttcatccagtccagttccttgtgcctgctctccaacgcgtcggcggtggacgcggccagtctgcagaccagcatcaacgacacgagcaagatgccgaccgtcacgagcattgactcgacgtccgtgggctacgggttcacgctcaactcgtggaactacgacgcgctgccgctcggcgcagagctcacgaacgccgtcaatttcacggccagcgacgtcgacctcaacctcgctacggacgccttcgctgccttccaggaagcgacgggcttcgacttcgtgacggggtacgagatgttcctgcagggcaaggcgctcttcgagaggtccgtgtcggacgccgacgtatcggctgagtacccgtgctcctgggtcgatgggaagtacgccgacgacggcgttgatgcggaccaagacaccttcagcacgttcgagaacaccagcgagtacgcgggtatgcgcagatgcaacggggccgtgagctcgctgcagctgctagccaatatcacggacgtctcgagtcacagcctcgatgcgttcgtggcgacggttctggtggggatgaacaagacgctgaacgagtcgacgcagctctctctggacgaaacgaccttcctcctcgagacgtacgccgtctcaccgcagttgaacctcaccatgctgacgctcgacatcccgctggacccggcggtgcagtaccgaaacctcagcaccgactgcaccgccaacggaaccttatcgcccgacgtctacgatacgagtctctacactgccgaccagctcgcgcagctcgacgagatctactgcaacacgtccatctacctctacagcagccccgccgccacctgcgggtcctccaactgcatcttccgggacgagtcgggcatggtcgcgttcaagaggcagatcctgctgctgccctacctcaagagctgctccgtcaaggacatgacgtacggcagcgactacctcaacttcctgccgtccgggtgcacagcagaggaggattcggcgttcctctacggctctgggacttacatctcgggagatacttttgacgactcggaagcgctcccgtacatgataaacccgcggcggcacctcgtcttctccttcgccaagctcgactggcagctggaagacgtgagcaagatgttcaacgccgggtgcggagtcccaggcggttgctcgggcctcgtccacgagctccagaacaccacgaacccaagcgctaagacgcgatcggtgctggtcgttggcaacagcacgatgccctcggcgcgaatggaggcgaggttcatcaaccccgtgcagctcgtgtcgctcaacgcccagccactgctgtaccccaagaccaacgagcggcacctgtgggaatacgtgcagaaggaccgattcgtccagtcaacctggagcgagaatacgttgggggaactcaattgctcggtgcttgtcgactcgttcatcacccaagtggagagcaaccactactacctggacgacccccgtcaagccatgtacacctcagcgttatactacctcttccagaatgcagcaacgaagtccgtgacgctggacgataaagccccagacggggtgagcagcttgtacttggggagcacgcgcttggccggcgacacggagcggaagaagatcaaatactccatcccactcagctctgccatcgccacgttcatcggcattggcatcgtgatcgcgttctccttcatcgtggtcgtcacccccattgagcgagtcaagacgtcgagagagaccaactttgcggcacggtacaccgatttactgaccaaggaggaatacccaccagaggttcacaactgcgacctgcgagtcccaagcggtgagttgttccctattgaggactgcacagtcgagggcatcacgctgcactcgctagcggatgagtccgagaaagtttatctgtagtcattgtcttgagggggggggcatcagcgttgcgttaataaaaattgcaattaaactgttgataaaattgtggtcaacaactacaattagaaaattgactgcaatgattttattgaattgtacaagacagttgacttgataagtgtatgtgcgtgggtagccaatcaaatggtccatacagacccctatacaaaccacgagaatacaattcaatgcctacattgcaataatgcaatgatgtacgtgttcgcgtagccaaattacacctgcgctagtctcagtttagctagtcggcggcatagtgtggcgtccgcatacgtcgagtctcctttgactggcagtgaatcagcaatggtagtcatgagggccttccatttacgtcggtattgggcaagccgtcgaagtctctccaagtctgagctggtgcggaggcggtagccacacccactagcatcaaggtcctgatcgaggacaagaggcagtgtggtacggggcctacctctccacttgctgctgtctgaggaagaaaacttcgccttcatctggataaacgccgggatatcttgtggtcgccgtagaatgtgcccgagaagcccccacctcgcagatgcgatccggtgacggagcggccgctcgtcacacgttgcgtggagatcagcgttggaaatgtggcacgggtaacgcacattgaggacagaccgtagctggcgacggtggaagctttcgagtcggtgaagctctgttggtgtaagcgcccaggtcccgcagttgtagagtagtatcggcagtacttagcagatgtaaaggcgaattcgtgtcgtgtctgtgatacggtgcgatctcagccagaccgtccagagccgccgaagagcagccgcagcgagtattttccgacgcgatacgtcatcggcatctccgagcaacaagccaagcttccgcgtagaccccatgcttcttcctctgcacgagcgtgggggtcgtgtcaggcagcggcggagagttgtgtgctccgtctttgccgcgttcatttgaagcgaccagcgcgcgaatacttccggggcataggtctggatgagctcgacgagggcggggtcccgacagataaagtcgacatcgtccgcatacacgatcgtttgctggagcaggtccggcggcattgcagggtgactagctagatctctaagtgctgcttctaggtagataacaattaatactggtgagagtgagtcgacctgtgttgctgccgaatggttgcaggatctggtggccgatgcggagtgaaagcgttgtgtcggatagtaagagtcgaatcagccggatttcgtcgtcgtgtagaaactgctgtagaactttgaggagtttggcacggtcgatcgtgtcgaacgcgcgcgagaagtcgatacccagtacatgaacgatttcgcgatacttttgtacccgtgcgcacagccacttgtgggcccacaccacgtcagccgtactgcggctcttgcggaagccactttggtggcctgagggaaacttgtcgaccgcgggtgtgatgcggcggagaacgatgagtgacaccgctttgcgaatagtgttcaggagaactatcgggcgtaggcttgagcactgccctcgtggcttgttcggcttctggagacacagcaggattccttggcccagtgggatgggttcaccgcgttcgaagctgcagtttagtagatgtgcgagtcgtggagcaacgtcagcagcggcatacttgagtagttcaccaggaatagtatcggggccagcagcacgaccgttgttcagtcgaaggagggcaccacggacttcgtccggcgtgattgggcagtcgaggggttgagctgttgggcgatacttgagcttggtctggatttagaaactgttcttggaagtgatctcggacaattttgttagctgtgtttctgtgaagtacatacttacctgatgagtcttgaattagaagctgctgtgtcggtttgcgggagagatcgagagtcgcttgaagcctcgatgcgtgaaaccttttcgtcgagggccatgttagcgaggtcacagcaccgagtgcggatctggtgtaggatcttgtttcgctgagagcgcagcagcgctgtgttggccgatgtgtcgttgtaaatgcggagccggagctggcgttgttgctcggacagcgcggcgagcagctgatcgttgtagctgcggcagcgtcgttgatccggcgaagaaaacccgatggtctgcgatgctgcttcgtgtagcttcgcaaaagtgtcctcccattgctggttgatagtggatccatcgtcagcgtctgcggggggtaggatccgtttaacggctgatgcgtaagcggttctggagtcgtcgtagtgaactaactcgctgcgtgcgaggtgaacagttgtgccgcttgtgcgacgcgacggaaaccggaggcgacggatgtgcttgagctcgaagtccgcggtgacgatcttgtggtcggacggggtgatggccccaccccaggactgggcatctagacagaaccgtctgcaactctgagggcagagtacgtagtcgatttgattgtagacacagtgtgtccgcttgcgttggctccaggtgatcttgtttttcgctcgcttgggaaaggctgtattggtagcaaagagttgataagtatcacaaaaggcagccaagaggtggccgttccggttacgcgtgcctcgtgcatgaggcccgagaaacgtttctccggttgttttctgcccgagttttgcgttaaagtctccggtaagcatggtgatatctctgcgggggaattggtccatggctgctcgaaggtctgcgtagaaagcatccacttcggttagtgggcgctcgctgtgtggagcgtaggccgtgacgatattgatgggtcctgtgttaggtagccgcatctgcaagatgccgatacggtcgctgtgagcccagcaccgacggaggtaaggagtaacgcgaggagcgatggcaaatccaactccgtagcgctcttcctgtgccggcaacgttagtagtaagtagtctccgacctcaaagcgccccagctcatacagcttggtctcttggaggccgaggatatcgatctggtagcggcgcaggtcttggggaagcgtttcaaactgcttgtatagcgatcctagggactgcacattgaacgagcctattctaaggcggttagtgcggtcagtgcggttagaacgatacggaaggggggttgtgacgggtagtactgctggtgaaggtggctgccaaagggagagactcgcaagggacttgcagacgcccgagagcgcctgccggaagcccgtgagcggcattcgccgccgtccacgcgttccgggggagggcgtcaccccaaccccaaccaaaaaatgcctacattgtacaattaaaattgaagcgtgacggcaaatctcaatcaatttttcaatggaaattgacgcaacgctggggggggcatacaagtacgaagcccagaagcgttaaaatactatgttactttggatattatttggcggaggctgacgacaacgagtctcgaaccgagttgaagaggaggttgcctcgacatgccaaccggtcgatggtctcctgcatctcgatcctcgagagcggcagcgaggtgcgatgcagtttgaagaagttgctgcgagccatcaccacctccgttctcgtctgcagcttcttggggttgtgagggcacggcaccttgtgcttgtgcgtctggaccgtcaggatggacgtgaggtcctgccgcagcttcttgtcgggcgagtacgggtgcaggtcgtctttgtccacgcagtcgatggcgatgacgccgtactcgcggccgtccccgaactcgtcgttctgctcgtcgaagtggcagaagatgacgtcgttcgactcgacctggaacccgctgggcgtggagcgcaggaagcggtgcagcgagacggcctggttctcgggttcctcctcctcgcacagcgtgaggtcgcccgtggcctcggagatcatgatctccatgtggaagaggtagaacttgagcgtgtcgaacacctgcttggcgctgaagtcgccctccagcggcatgacgacgaacttgagcgcgcagtagtcgcccgacggagacacgaagctgctgagctccgagctgggcacgctcaagtccatgaacgcggtgtgctcgcgcatgaagcggcgggcgtcgcgcagcatccgcgacttgatattcagcagcgtctgcagccgctgcctcctgtctgcgcgtaggtggatgaagctgtcgaatgggaggagcttctcctggcgactggtgaagtccgacagcgccgagtggatgcgcgcgagggcgagctgctggcggtgggcggtgtctcgcaggcacgagttgacgagctgctgcttctgcgtcgagttggtatggttgttgatcgtggccgcctggtgcttgaggtagtcgacgtactcctcgagcgccggcagctcctcggacagcgcctcgatctctttctgaagttggcacaaagaagcgtttctcaacttcagaaacgcaaaggaggacaaggcaactaactgagctgtactgtgcaggtaggtaggcagactcaccttccgcgccgtgtacgtccgcatgcggatgttggagtgcttcgtgtcgtcgtcgtcgctgccgagcgaccgcttcctcttgcctgctgcagtgactgccttgctacgggtcattggcactttcggagacgagcagcagagctcgtccgagctgctgtcggtgctgtggtgctcgtccacgcagcccagcagcaccgagagttcatcggtgccgacggcctggaactcgtcgcaggtggctggggacccgacaccaggagagcgaagcttggtgtgatcggaagcgtgcatcttgcggaatgaaagagctgagccgagggacgcagtgcagaaaactgtcggtgagttgcaggggataaatcaccggagagcatccaacgcaggttgggctcgtccagcggcgttttggcttcctcaggactctgcgaccgaaacgccaagcacttgtagccagcgcttgacaaaaaggagcaagtacttactagtacagtacaggtgcaacgcgttgccgctcgggctagattcggctgactcacgggcgcctgcgttcaaaaccgcccgtttccaagtcaaacttttgttgctgcgatcgcgcacgcgctgcgacgcattgataacaacggactgcaatggggcacacggttgctattgctgcttatcggcggcgagcactgcgccagctgatccatacgagcaaatgtggaggccttgacgcttgcaccaccggcctgtctgaacacgcagatgagtacttccattaatcgcgcgtgacgcgctgcgagtcgcctgggcggaccacctattgacgggctccgaaagcggagggccggtgcgtcacccgcaatggcttcagccgaacagcacactcaacgggacccgcgcgatctcggcgctgccaaacaaacacgccttcacgatggcggccagcgagtatcgagcccccacggcctgcaggtacgctcggagccttcaaacacgcataaaagcaagtcagcaacgataaaccacgccgcagtaggatacaatcagcgcaccttgtgaactgcgcgcagtagctggaggcgaccggcgccaactcgaaaaccgcctcctcagtcttagatccgccactattcgcccagctcgcgagtgctcgtcggagagtacgccgatgctgcgcctccacttgggctgactggtagcccaacccaacgctctctatgacggtgccatctcctgccggatcaccgcacgtttggagctgcatcccgacgatgaagaagcgagggttccacacgcggtagacgagagaggctacgggtaacgagctcagtgctacgacaggcaaccaaagtgccagcgatatgagcacaacactgccacgcacgcccgcgaagaacacgaaaaagacgagattggtcgtcacgaggaacaccaaaatggtgaagagcagagtgccgagaagaagctgccccacgtcgtactcgcacgagtccacacgatgacgcagcaaattgatcttcttacccagaaagagcttcgacagcgacgagaagagcccaaactgcaggcggttgagcttggcaaagtagaggtagacccagtgcgagtgccacgtcgaaaggctcacgaggtctgccagcagcgtcagctggagcgttatgcccatgtgtccacacacgagcaacagccactgcccaaggttgccgtcgttacccagtgccgacaactcttgaaaaataaagctccacaggttcagccacaagaggatcccgttccctaggatggaggccaagggtttgttcagcttgaagcctgcaggggcgcccataagccactccacattgctacgcaaaacctccacgactgcagttggagagctgttccacaaacaagagccccaacgcagtcattagacacaagaaccacgctctcacactgcagaattttgcatctctctcacatgtcggtcgcctgaaaagctggagtcaccagtccatccaagtacacgagcgctagtcgtccgagtaccacatccagcagcacgaagcaaacccaattgaacacctccagtagctccaggcctggcagacgaaagcatcggatcgtcagtctccaccgaatcaatttaacgtctaaatagtagaagacacccacgttcttggtgcgatagccccctctgcttgttcgcaaggtaaaaatgccgcagccgattcggcaaactcgctgcgttgtgtacttgctgggccagcactgccaggaatgtcgaaagctcctgcaggacgagagagattagcagaggatgtcactccaaccacccacacacgttctctctttgctgactaatggaatctcataccgcgaggcttttgcctccaccaacagggagccacacaggagtccgcgtcgcctgcaccaggtgctggaaggcggtcgccactgctagcagcgccacgaacggcgcgtagacgaagtagaaccccacggtctccagcagccaccgcacgcctgagccttcggaggtctctgtggacttgtggcagctgcggaattgctccccgacctgttgcaacagcagaggcgagtgcagcgccttgaagccgccgagagccgccacggacgcgtcgaacagcacgacgcgacgagacttggacgccatcggcggcagcagctcgagccccgcggatgctttagagcccagcgacacgacgcacaggatgtcgggagataggcggcggcacagcgcggacggagacgcagcggaagcagaggacggcgcccacagatgccgcggccagtacaccacctcggactccatgctttagtcccgaaatgtgtactgtgcagtatccacagcaccatttatagtcctctttgtgtcatggatccactgcacaaactacagacttttgtgccggtccacggcctatttatgaatggcgttacagcaaccatatgacgacaaattaaagcaaccacaaggcctaaagcaaccctaaaaccagctggcacccggtaatttattttaaatgacgcgtaaatgacagggacacgtcgccctcgtcatggtcttgctacatatatatctaaatttagacacgtcgtggtggcgtctaactgatgttctctatacagcaatacgtgaaacacatgacaatatgtgtcccacattttcaacacttagcagattttgagcgacagcaaaaatggagaagaaatcgctggcacatgagctggtgcgcgcgagaatcgccgagattgcactcctcaagaagaagctggatgagcttaccgagcatctggaaaagcttctggcagcgcagctacaaatccaagccctcgtcgaagatcgcgaagagaacagctatgcgttagcagccgtcttgggcgatgaaggggccgaccaaggtggtctcaccgcagaggacgacgctgtttccctcgatgttctactggagctggcggtgcgaaaatgaaagactaatgcagcatagactctgtatttaaaggtaaatacagactgtggtgtttctcagagctggttctgtagctgctgatgaacctggctagctttagcgacgtcgcgttcagagagatgacgatcttgggagtaacacatgatgacccacagcattttcaatcgcatcaccttgacgtcgttcttggaaattctagaaagttgcatctgcaagttccccgtaagatagctgtgggcttgggctactaccattacaccacagctagcaaaatcaggttgttgaggggcacagatccactcaatcggatcgaagaaaagatggccacgggggtcagaagccttgtaccaccgctccacataaccacgaagcccctcctttccttcattttctttgtctttcggaattccagtccacacgatttccatttcatggtgatagtcaccatcaatgagcggctcgtacatgtaaacatgcacccgaagcttgcttgtttttgccgtgtagcgtaggcgaaggataattaccccccagtggtctgcgtacacattaacggggtggataataaaattcgttgctgcaagtgctgtcttagggagacttggccatccgatagcccatgtcagtgatgacagcacatggcacttccccaccgatctcgcaagggtctccaagcaaaagtccacaggactatcatttagccatccacgacagatccctcccacgatgttgtcaaaactgatcaggactttgttggagagcgtcacaaattcagtgcgtagccgacttgaagtaaactttgagataatttcgttcgctagaccttggtgccgctcgggaacagcatcacgcggtagtcctgcagttgctgtctccgcagcgaaaagatccacgatggagtcaactttacgccaatcttgctccagccactttcggtccttcaaccatgaggtacacttcgccttgatcgcgtagaatcctgttagagcacctacatattgtctagaaacataagcatgttaaagcaaccctattaaagcaaccatatcgctaaagcaaccatacccgctaaatttccacagttttggatcaatcgccaagacgacgtcgagaacaagtccttgcttcttggccttttcatccagtacaattggctgcttctccttccgggtagtagtcgttgctgcctgcattgatagggcgaggtcttgtggaattacaaatgtgtgcatgtagtccgcaggtcgtacaatttcccaatgacaatcaatcttccgagctcttagattggcatcatccagctgaacaggatacttcgacagcatctccatcacgcgcttcagatttgaggtgtttctggcccaaatcaggaactgatccaaagtcacggcaagttcagtggggtacttgtgaacagcaagacgctcagctttgagactgatcgtagtttgcctcagctgtttcggagttgaccttgactttccttggcttggtggcttaggaactctaacgacatcgacctggcgcacgcgcgactctgtgtcaggcttcgtagagcttgaaaccttgtcacagcttctcattccgcagctgtcatgagatttctcgtcgatggggggtcgaattggagatgactgcgaaaggtgagtgcgttgtgtcggtaacatactttcgtcggactcgtaatcgccataattcatggtcatggggctgctttccaatgcgtccatgagcgtcatagtccccattgcctccacggggtccagaatggagtctgagacagattcagatacatcttcttcttgcttgctatcttcagcagattctgtagaactcggttggggggcagggttgacacggttgagccctatgtcgatcgtttccttccaggcacttagctcttggtagaagtctgcactagacaaatctgacaggtgttccaatagcggttccagcatcgcttttgcgtatgcgtatttttcagctgaagacaatacaacctggtttgcccgttcacctcgccgtagccgtacgtacgcaacttgcttcctagctttggttggcgaagtgttacccccccccccccgcagcataaagtggttgttctggttcagccccagtgtcgttcggcaactttactttcggcaaccttaacttggacatctgcacaattggctgtaacatttccgctgcagccgtcaattcgtttttcacttccaaggtctggtacgtactccaccgatcatgaattgccatagctggaagcagtttgaagccatgcccctggcgtgctaagtgcataagatgacgacatggtaaatggtgactgctataaaatagacaagtacacgtccactccacatcgtgacagcgaaaggtttgattcccgcaataaattttccattgtgaaggactcgacgctgtacgctcacaagtcgcatctgccatgaaattcacaaatcgtttccactcttttctcactttctcgaaaatgtcagggtacagtcgagttgctaccgtccggagaacatcggtatggttttaggaacgggcgaagtagaatggtgctgcgcgatgacgaacccgatctgctgagttatcatgatttgatgctgcaccaagcccgcaatagtcttgtcaattcgtgtcgtgccccaacagtattttcacttgattccagtttgactcgatcctgttcgttgtagtattcccagccgtgaaaaatttgctgcgagcaaagttcgcccacatgtctcgacacgaatcccagttcttttcaaagtacgagaataaagcttgtttcttgttgtcttcgcagtattgcttcaatgcaccgtaactagaatcgtaacctgtcgctgtggagctgcatatggtttgttttccaaagttagcgttaccacaagaatcataaatagaacctgttgcgtacctgtacagcgtttttatcatcaggttgagtaactcgtcgcgttcagaaaccttcagcttgtatggggcccgctgcatcaccttcttccagtacgaaatggcatgtaattgacaaagtaaaactttcgcagcaggaaatagtgttttcagcaccctccactcaacgaaatctttgtcgatcacgatggaggatatcatccgccaacttgggttcttctcttggaaatactccaggattgttgtcatcatcggagctcgttggttgaggcatatgaagtctacaactgggaaccctctaccagtagcggttgtgacgaccagactccctgaaatatccaacacacaacagtagaaaatcactttgttaatgaggttgctatatcatcgatatggttgctataactacgcaaggttgccgtaacaaagataaagttgctataccgaacaactcatacgcacccaagtgatagcccaaattgttcgtgccgtgagtgaaatccatcgtaagagtgtcgccccagcgctcgaacatcaacttctgcatctttgtttgcatcacgataccgcatgtcacgtccatttggtcttgaataacaagaacgtcactaccgtctaactggcggatagcttgcagcatgtctttcaaacgggcctccgctgcgtcgtgtcccataatactgcggatcagattacgggtctgttgaggtgttattttgcagcctagcaaacacacaaagcgcgaacagtaacgtaagtatcacttcagcatatcatatataaaactacgcaccgattctctcattcaggaagttcgtgatgtgcttggaagaaacactagcatccgttaaagtcttaacatcttcgagatcttgctcgtccaacggaagtgtctttgttgtcaggtacaacgatgcttgcgtgtggtcgggtgcgtgtgggtaaagttctgattatcaacagcgacatgtgagaaatactaacaaagcaaacaaatacacgaataggcagatacctcgtttcttatgaaaaatcgaaatttgccatttttcatccgctgaacggttggtgtcatgcgtgcaggacacctttactattgcgatgttccttggagcgcgacgcttgcgaaacaccgtgtgtacagcggaggaccttgtgactccaattaaaacgtgaagggatttggtcccgatgattgctgcatatgaaagggggtttcgttaataacttaaatttctcgtcaaacagaggtcacacatacctgttgtactgatttcgtgtctccgagcttcgtactcgaaacttgaggtggtgcttccgcttgtatattttcaagtgtgcgttgaacttgctccaactcttgataatcgctggggtaaaggccggaacggggttgataatttcttcgcgctcctcgctgatctcccgcaactcgtcaaggtgcttgcttgatcgcttccgcggtatgtactgcttgttccgcttggataaacgcggggcagaatcagcgtcgacagactcttgaagctgcagctccgccttacgctttttcgcgaaagattgggcttcatccccagcagaaagtttgcatttggccagagcggtatctatcgattccaaagtgaatgtcaatattttatgatagcgcaacctttttgcttaaagcaactttaacgagaatatctggtgttttcttgcgtgctgtggctttctttctcggctcggggctctgtttgcgtgtcctgcgttctaaacaaactaaaaaaagtatacaatacattatcagttcaactcaataagtatcaacattaatccaaacgagtcttacccgcttctgcttcgtcttctgtgctggattctccgtcgtcgtctgcctcctgttcatcgtcactcgcctcctcttcatcgtcgtcaccctcctcttcatcgctatcgctctcctcgtcatcatcgacctcttcttcgtcttcctcctcttggtagcaatcctccgcctcttcgtcgccgttgtcttcctcatcctcctcatccagaacaaagtcttcgtcttcgtcgtcgtctttttcaatcccgagagcggcgtacatgtagtttagctcctcgtttacgttccgcagctttcggcctaaacaatacataccgacagaattcaaacaaaatgtgaggcacgtagatactctcgttgccaccaacatggagcatactgattaccgtttataatggctcccccgcaggagccatcggtcccccctcgccgtttggtgcttgactcattcgcgagaggtgcgtgccccacgtggcgcgattcttaaaatgagcggctgtgaggtggcgcacttaatggcatcgtacctaatcagaagcgcactttagcgtgatttgcgtacctaagggcttaatggtaatttagacatttaaattacgctcgtaatttttgaaatccctaaaaacaaccatacatgtctcagaatggctaaaagcaaccatacttatggttgctctaaccactccccctatttatcgtcgtgtttgtatcatggatacattcgacgtacatcttcgtcccaattccaagtcataggtcagcatcatggaggacgagctcatcgcgcagcgcgacgcggccatcgccgtgacgaaggagctgcagcggcagctgcagagccaccgcgagcaggtggagcgcaccttcgagcggcgcacgctgaacgcggagcgtctgcggctccacgcggaggagaagctgcggcgcgccgtggaggaccgcgactggagcgagagctgctgccgccggctgctggcgctcgcgctgttcctcggctgcggcggtgccgtggtcggctggaacctggggatgcttgtgctgctggtgctgggcgagcccctcgtgggcttcctgctggtgctgcctggtatggcgctgggcacgttggtggggctggcagtggccaagacgaagatccaactcgagagcaggcgccgagacgccaagaacaaagacgccagacgccatacagaggtggagatggccgtcagcagcggtgtgagggagcaggacgcaccgctggagccgctggaaggagttccaggcttggaggacgtggcggagaggaactccaggcaggcggagcaggacaggagaagggatgaggcgagcgacaaggcagctggatctacaccgctgctcgccttgggctggagtgcggcctggttcacgctgcagacgtccaaggatattgcggtggggctctaccacggaggcgactacgtgcgaggcattctgcatccgcctgaagacaccaagaagaaggaccaatagatgtttttcactcgcgtagcgcggtaattgcagtcaagtattaaccaacagcaatcagatcgagcgagctggcatggagtcgcgacgagcagagcagccccgcccacggcaacctgtgctgagtcctcccggaggacacaacgcaagactcctttgctgcttcgagttgacgtcgagtcgacagtcccagcgcgtgcacgcgggtggctacacgggtccgtgcacagcaacaggggatgcccaccccagcagcaagatccagaggcggcgatcactttgcctcttttgcatggagtctggtggctaccttttcccgcgaagtaacttacatgtaatagtgagaagaacgacgaccaccattgcggcttgcttgtccgcttcgtataccggtaccacctggcgcgccgcgggcgtgctgatattgaggctcttgcagcatgagtcatgctgcgtgaacgccgcgttgaacacacggtgtgttcactggacgtcacgtacagcttgtgtaccgtcggcaaatcccgccgctgactcatgtcatgtcctcggtgccctgcagaaacgttgctgtggagtgccgcgctcgcttctccgcgcgggccgacggctttccaaagagaggctgagcttacatgtactgcgaaaaatgggggaaagcctcggacgtgcgcgcactctctcactctctctctttctctgcgataagcctcgcgctgatacctgtacccgtcacggaaggccgacagggtcgagcgtggcggtgctcacgagacgtgatcgacatcaacagatcggtcaaaggatcggcgagaggacgacgacgagagcagcgacactcgatcgtcgttcgattgcaatgcatcagcgcatccgttcgacaagcttcgagaagccaagggcgcctgcttgatcgcgcggcgcatgccgtccacccaagtgcgtggaggaagaagcccaagctcttagcgctgcgcttgtcggccgctgcggcctccgcacgggcgcgttgcgccgggtttcctgctgcgtggaaatggcttcgctgttgcccgccatctcgtcacctccgtgacagcgagttgatccgaccttgccacagctggccacgcagcagctggtgcctgtggctcggactccgagtcggagctgtcgacgctaacgcgatgaggcactcggggcaagaggcaacgcgacggcgattcccgcggggatggcgtagcgttcggcggtcgtcgatgtagatagcaactttgcaagatacaatgtcttgcccgtgggttcatcgtgcagagcatcagtggagtaagcaaagcgaagtaacaccaaaacgtagcaggatcgacaataggttatatgttacacttttatctacagggccaatccctcacctcctaagccgctgcagtggaccgctcctcttgttctgtcgctcttgctcagctgggtagattcgcttgctcatgcactaggtatctcacacacgttgggggggagggggtcccgccacggaccgggcttacacggccaggtcgctcacgcccgagggactcgactccttgggcatgtcctgctttacatcgttggtgtagctggcgctggggcttgagaagtccgacgagatctcaaacggcacgaggctgaactcaatggcagtcacgacgttgtcgtcgtctgtgaggaccgaggccatgagcgtgagcgtcgcgatgttgttgcctgctccctgcgcctgcacgatcgcgctgatgggcttcatgctgctgctgaccgactgcacgaccgcgtcgagcttgccgttgtccaggcacaggctggcgcgcagagtgttgacgtccatgaggttgtccatggtctgaccggtctgggccaggaaggccgagttgacggccatgagctgcatgttgaggtccgccacgaggcgtggcgtgctcgactggtcgaagcagcgcttgaagacggcgtcaatggggccgccgccctgcgcctgcgagcggaagctgtccgcctgcttctcggcgcgctctgccttttgctttgcgatcagcaggttgctgcgcagcatgctgatgtagtggtacgtgttgtctaggatggactgcttgttcttcttggactgcacgccggcctcgtccagcagcgtcttgagctggttgatgcggtcgttgagcttgaacatgcgcttcttttccttcatgttgagctcctcacgcgagcgcttggagcccgagtgcgagggcgtgtggccgccgcccacggagccgcccgagttgtagtcggtggacacgtgcagcatttgcgccgtcatgggcgggggcgcgtagtactggccggggtgctgcatgtttatcatgatgggttcatggtcgaagtcgccctgctgcggctggtgctgcggcgtctggccctggtgctgcggtgtctgcatgtggtgctgcggcgtctggccctggtgctgcggtgtctgcatgtggtgctgcggcgtcatgttgttcgggtgcacgagctgctggaagtcgtgcatgcccgggccgtggtagccgccgccattgccgccgtggtccagcgacgtgccgaagagcttggggcgctcgccgctgtgctggtgcgcctggtagtgcgagtagccgtagtcgttctggagcatggtcgggtctgccggtcgggtggtgtgtgaggtgagcggccgagtgtcgagtgccgccgggtggtggtggcaggcagtgagcagtgagcagtgcgcgggacgcgtccaaatgggaaatgacaatatggcaggcagcagctggtagaggcggcgctcgcctcgccgctcatcggttttcgagatccgatcggttttgacgggttcggcctcgagcgtcttatcgcgctgcctctacagacaagaaggcgaggccgggctaatttcttccgagggggagtactgtagggcgcgccattccggcactgcaagcgagcgccgccgccgccgcaaccagccgccgctgcaagagccgaggccgattacctggcgcatgtgcggacagcgcgcaaacgcacgacagctggcgcgcgtggaggacggaagacaagaagcggaagcagagccccgcgccgagcgggcaggcaggctccgcgccgcagcagcgaaggcggaggcgataggcaacgggctccgctattactatggagaggctcagagagcagatcagcactccagttgaccagcgctccccatcctgtgcgcaagctccgcggctccatcctcgcacccacccatgcatgcaggcaggcagcgcggcttcaaggtgaagttgccgccgcctacctacgcgacgcacgcaacgccgaagctggccaagctgtgtgttgcctcgcttgcacggcggcgccgagtcttcgcgggctttctttagagatcgacagcagaccgacctgatggccgtcaacagccggcggagactaccaaaatcgtcaattcatcttcagcgcgcggggggtctggtaaacttcaccatccggcacatgggacaatattttgctgaagaactgagcccggggcgtgagaggcaagcatcgtcgaccgtgctcaatctatttttcaagcggatactcctcccgagcgcagagggatcaggggtgccgtcggtgccggtgccgacgttgacgttgacgttgccgtgtcggcgcgcagcggagacgctcactgcagccagggtttgctggcctcagtccagcgagcccgaatttccgctgcgggggtcggcctggggcaacacaatgcaggcaagaacccctatcctgcgagatggccgctgccgcgcacgtacccgagttgctcatggcggccgataagagagccctttaaggcggagcagcagctgctttcggcgagctgctgtttgaggctcccgtgagtcaaccgcgcggacagagctggcgccgtccgctgcgctggtcgtcgccgcaccacttcccggcgccttgcatagagcagcccacggggaagaacacgtggtttgcctcgtcgtcttcgcgagagaaggcgcctgccacccgccaaacgatcgccaagccacatggcatgccgtgccatgtgagcgagagcggttccggttgccgtgcgtctgaagacgatggctgcagcgcttcgtctctgtcggaacgccgctgacgccactacgctgagctggacgccgcatccgtacagcggctctccttgtcactcgcgatccaaagagcaccgctgtcggcgcctgcgcgaggtcggaaccagaaggttgccggctgaacctgcagccggcggtgccggtgtcgagacgtgcgaggcagcaacgcacaccgaagccatcgcgccttctgctcgacgtgaagcaggcagctttcggtcgtcgtcgcgatgcagagcaagaagttgtcaccgcttcaaaccccactgtatcagatgcgcacagcagcgaccgaccgaccgaccgcctgacttgacgcctgtgtcaaccaacgctgcctgctgagctcgttgtctcgagtcgaacatcgacagctgagaaccgctgaaagccggctatgatagccgagactagtgcgaccggttgcgccaacctagacttgagacggaggcgtgttgcaccagcgagtctcgcattgcagcccgctgaaccaaagcggattcattgagacgcgggaatcaacttggcgacgttagaggtgagtttcagaaggatgaagcttcgcagagcagagcacagagcttgcctgtccaggcaagatctgacttggccgtaaacccgcggcgtcctcgcgctgtcagcttgtcgacgccgcaactcaacgaccggtgttgcaatgcaacgactgctaccgtcacacaagaaggaagccgcgccgaaacttccccaccgagccgccagccggtcaacttcaacggcggtgctcgcgctggtttcggttctcggctgcaaggggatcacaatggacccgcagctaatacatgtacctcagaggtcagtgcagttcggacagttgctgaggaaacgctcactcagttcattaatcatttcggtgctatttgtatggagcccctgaaacactttcatggtctctcatcgatttcatttgtctgctcccccgcgctcctgttgctggtacaggttcgtcgcgtgctcgtccagaatggcgacgaggagccggttgtgcgttggcatcggcgtcagcagccactcctcccgctgcgtcggcgcggtcgagttcagcagctcgagctccagcgagagttggtccaacgcgcgcaggtagagcatcttatccacgcgcgagacgcgccgcttattgtcatacaacagcacggccgttggtgcgatctccgtcgtattgccagagcgagcgggtcttattaccaggcgcagttgaaccacgctgtcgtggcacacgctggcattcacttgatacactccgtctttcacgatggtgatggcctgtgtgagccccacgtcggactttgtgggctggaagaacggctccgcgatctcgatcagctccttccactccacaacatacttgcgtggagtggccgccgttgctggtcgaagaatagaggtctcggtatcggtggtggctccggctatcagcgctcggcacggctgaaaagcggtcatccagtccgagcacgcgaacacccacctcatggcccggttcctgtcgcgtttctccttctctaaggccagcttcgaagcctcggtcttcttctcgacacgctcagccactcgctgctcaagctcctgctggctctgttgttgctcctggagaagcgcgctctgggccgccatcctcacctgaacctgggcttcgacctgcagagacagtgtccgctcattctcctcctcttgctgccgaagctggtcacacaacttgtcgcgatcagtctggacatgtacgagctgctccctcagacgctctacttcttttgcaaggtgctgcagtcgatcgtccgtcggtaccagcttcatcgggaaatggtgatccactcgaaagaggtcgagtgctgggtaagctacgatcagcgtcaagccatcgccactgccatcggagtctcctgagtgtttttctgccgtggaggttcgaagcaacacctctcccttttcgctcgcgggcttcgactcggtagccgccttgggctctggccccacaatcacgactgcgtcaggctgactgcttaggcaccgaaacaatgccgtcaggaccgtatcggtgggcatgcgaacgttggtatttgcctcgggaagctccaggacgtcagtgaagctgtactcgcgctgctcatgagacgacaaattctccatccagatcgtatgaactggcggcttatctgccgacaccgttaccctgatgtggtatttgttgtcgaggtctggaggaattacgacctgcgatagctccatccaaactgatccagaagcacgagtgtcatccgtaccgctcttcgggtgtgacggtggggtgggagcgaaaacttgaggcgctttcgtcgaagaagagagaaaagagtgtgtgggagtcggcactgttgaaggcgctggtgcggctgttgctgctggtgctggtgctggtgctggtattggcgctggaatcgtgttgctcgtttcttgagtagagtgagctggtacgggctcctcctccttctgttctcctggcaactcaacgggcggactcatgataatactcgtcgcaggagaggactggccactcttaacgctgttggctcgggagtgcactctcgaaggaggccgacgcggaggagactcgccgtacaaatcaacacccagatcgaagccgttgtcatcgttatcctcccaaccttcatcatgagcagtgttcgtgtcctccagcaagtttcgttgggcagatctcgccttctttgcgacgcgagcttggggaactttatgcttgttctgtgtcgttcgcattttgccaccatgcttgtccgaacttgctacttttttcgggctgctacgcgaatgacttcgcggctgggtcttgggctgccagttagacctcttgctagtatgcatgacgcctcctttcctgtgcgacgtcttcaacaagggtcgcgtcttgtgcgtatcacttggagtgtcgtcgtcgtcgtcgtcgtcgtcatcgtcatcttcatcatcaagcgattttgcagatcggtggtgcttacgctcgggctcaggtttcgtttcagccttcgcttttacctccactttgtgtcccccgctggctttaccagtggctttccgcttgacgtctcgaacctgagcctgagcctgtttgtgtgatcgagatttgcctgtcgatggcttcacagaccgcttggtgtgggcggcgatttctagatcctcttcctccggttcgttgttggtgtcctcttcctcctccgaagacgacgtcgatgaatccgcttcctcctccacttcatcatcatcgtcctcttcctcgtcaaagcccctccctgtccactcttcctcctccacgctactggcactctctactgcgactccagtctcctcgtcctcactggagtccgacgacagcgcgatggggttctgcgccgagttccccaccttgttctcagacgaccgccgccggtgtcgcctgtgctttcgcttcggtctgttgctctcgctgtcactgcccccgctatcgatgtccattgtcgcctgactggttctggcgctgctgcaactacgcgctcgtcgtttgcctcgcgccagtccgttggctgggggcagtacgctcagaggcacggtctcctccccaaaaatcttcaccttgcgcgcgtaggccacgagctctgcctcgcccaggaagtagtccttgccctgcttgtggttcgggttcctcgggtccttgtttggcttgacgtagtagtggtcatagctgagctccggaccgcgcttgaacgtccagccttgcttggagaagtgggccttgacgtcgcggaagttgtagaccccgtacgacagctcttgggcgcagcaagcagcagcagcagcagaggaggttcaaagcaaagtcaggagcctagcgcgaggggattgccgccgatcgactcaccgtggcgcttgcggcgctcctctccaagcaggtccattttggcgcgctaaaaatcggtgccaattcgctgctgatggttcatttgtgtggcgattacatcaattgtatgtggcatacatagtttgggccaatgatttgcaccggtgaaaaaggcaactcgaagagtttcacatcaatgacaggataggatcacctacagcacgatactagctcgattcttggctctcggactcgataaatccccgatgcgtgctatgctatatgatactcgttctcaactgagcgtgtgggtggtatgacggcaacaatatattaataagaactttcttgcaaggtccaatggtgatgaaagatttttatttaactggacgtgtagattataatataatcgatatattattgtgctttgcagataaaatgtcgccccgttttatggcctagatcgaggaagaccggtccacaaatcagggtacaaacagaggcggtagctcgatttacttagatcgacctcgaattgcgcttttgaaaacgcaaaagggatcgatttaccgtagatcgacctcgttctgcccagatccaccaggagatcgacctcgagccctgatttggattgtcgtagctcgagttattagccggcctaaatagatcgatctgtccctttctttgacctcgttttattaaatcgacctcgacttaatgataaatcgatgagagctccaagtcaaaacgacaaaacgtttgcaaagcacaatatatcgccgagtaaaacataatcaagcagtcgatagattaggagtggtacacttattataataccgtttacagttttcccattctgctttgagctcaccaatggttagtcatatcatgaaagccaccacgaaggttatccctccctcactaacatactgtatcggcaaatatctccgtcatcttgctcgaatgctcaggttgcaacttgcaaccggttctgccttgcaagttgcaaggcacaaccgggtgtggtacaaactgattccactcgtggttcaacaacgaattcgatacatactaccgatacagtaatctgcccgagtaaggaacgcctgatatatataaagacgcagaatatataaattgatgttaagttgagtatacttttccaatgtactgatttagttatttcaaaatgaactgaagagcagctttacctacgagtccggaatgattccaacagtggcgtatggtcgaagcactaacctttgaccagacatcctcgcaccacaacagcgatgtcaactggtcgacctcgtagggattatctagcccttcaccaagccggtcgcatcattttaagtgaggcggagacgcttggaccgtgtggacttcatgggtggagtggggcttgtggggcgaggtgcaaaagcaaaagtgcgagtctaccactacggtacatgtagtttgaagtctagtaagatcgctaaatgcgcgccatttttcaaacgagggtggagagctgatgattggcactagatttttcaccttagtacctcagtaccttgcagtaccttgcacatccccctatcgccacatcgactggaaaataatattaaatatgtgaggctattagttgtacacccgttccttattcgggcagaattctgtagaacaattaacatcacaagtgccagctttggtacgttctggccagagcttagcttattagcaaacaattcgtgcgtgtgtagcatgggtcaacgctagctgcaaccgtaccggtggagatcgtgaactattacgccgatagaagccatacgtaccgacgatcgcgtatcgctattgccatgaaggcggtgtggacatctccgtagctcttgtttttgagcgcacgcaagtatctcaagaaccatcaaagggctgcgcgatccgtggggccagctacggcgtgctcgtatcgttcgctgttctgtagtcgaccagctactgctgcgagtgttccactttcaatatgaaaaggccgtacaccgtatacagtaccacttgacagtcaagtgtcagaccaattcaattctgctgcattcccgcgatcatttaccatgactacagtgagtggagctgaagtcaaagcccccctcttccaccgaaggcctcgcaattccgccaccacctcactctctgtgctaacgtcgttgcatccagcgacttggcagtgctccgtttcgtgcacagtgaacgacgctaagttagcgtcggtatgcgatggtcgtgggccgactatccaagcgcagctctggctcccatgcgtcgagctatcggtcttcctgctctcgttggctcttcctaagacagaactactatatttctactatccgggtacctgtacatgtgtatctacagatttctaaggcaatgttgatcatcggcggcgactcaaacgttgccagacagctttgctacgatggcggctcccccatccgatggcggtgctgcagcagctccagtgctcgcctgtccccaccgcggcggagatcctgggtgggcgttgcacttctcgcgtctggacgcggatgcgaatcaagcggcggggcgacgcattccggcctgaaacaagatgtccagagcagcaaagtattccgctgcgttggctgctaacgcaaatttgttgcgtaacggacggccgcgcaagcaactcggtagcggcctgacggaatgcaggtacgcgcgctgcgcggtggttcactacaaccgcggagtgcatgccaatccaggtttccgaggcggaggcggaaacactcaaacagcttcaacttgaccattgccctgttcggggccgcggagtgtgctggcgccaccgaccgctggaaagggcgggtgtgtaccatgcttccggtactgcgcccgtcccgtgcaaccgtagaaaccgtacactttgactgatgtcccactgctagcttcgcggcgcgcgattggccaagaccggcccgcgcactgactcgatcgggaatccagctggccgagcgcagcgctcagcgctggtcaccaagcgcgcgcccagctgccttcgcatttcccatttggcccccacaagcgcacacgccgtccacttcagccgagccgacagcgactgcccagccgcgtctctctcaatttcgttatcgcccccatcttgccccgcatccctcccccacgacaatgctggcgcccccctcggactacggctacgcgccctcgccggccaacggcatgaacggctatgaacagcaacagctgcagcaccagcagagcggcgagcgacccaagatctacatgcagccgcccgcgatggtgggcgagtacgggcaaatggtgcaccagggcactccgcagcacgccatgaccccgcaacacgctatgacgccgcagcacgccgccatgaccccgcagcacgccatgggccccaagtacgagaacgagccgctcatgatgaacgtccagggcggcgcgcactactacccgccgccgcagatgggcgcgcaaatgctgcacgtttcctcggactacgagtacgccaacggctccgtgatcacgccttccagcgcgcgcagcggctccaagcgctcgcgcgaggacctgaacctcaaggagaagaagcgcatgttcaagctcaacgaccgcatcaaccagctcaaggagatgctggacgaggccggcgtgcagaccaagaagaacaagcagtccatcctggacaacgcctcgcactacatcgagatgctgcgcagcaacctgctgatcgccaagcagaaggcggagcgcgccgagaagcaggccgaggccttccgcgctcaggcgcagaagtcctcgtcgggcgctgacaaggtggtgcgtggctgcttccagaagaccacgacgccgcgcgtcgtggtggacatgagcatgcagacggtgacgttcaacggcgcgttcgtgaagcacacgggccaggccgagcctgtgctgaagaagcagaagacgctgcgctcgtacctctgcgccgatcaggacaagttagatagcatcatgaagaaggttcgcgagaccaaccagtcgacgagcgcgctcgtgaaggcgtctgctgctggtggcaacgcggtgcccgtgaacctggtggcggccgtcgtgacggacgactccggcaaggccacgaacgtcgagttcagtctgatccccgtggagcagctgacgtccaagcagaccgaggtcgcacacgacgaggcggagacgtctgcggaggagtccgccacagaggaccagccgaaggaagagtctgcagccaacctgcagctgtaagcctcggtggcagggctgcagcggcgctactggcgggatgtgtactataaggcgacgtttgtctaggcctgcccagctactagggtgcggccgaccgtcgtgcaagaccgacgagagagcggggcccacacccagctcgagttccagagtgctcgtgagtgctgagtgtatgcgtagtgtgagagtaagagtaagcttcaatgcaaaggtgaatcatgtgtccaaggcgttgcgttggtcgttgggtgtgccagttcaagcgttgcgcttgccaggaatgcctgaccgaggccgccgtacgccagccacacgcgcgagttgccttgcgtgctggccctctcggcaggcccacacacagccgacccggctttgggcgacaagaacgcagccccgagcagacaacgagcagcttgggtcccagccagcgttcggcttgaattccatcgcgcgcaaaaggccttgcgactcaccacagcaaaggcgagcgctgttgtcagcgactcagccacatcttttcagctttctgatcgagcttggccactcctctccctgaaatccagggacgcagcggcggtgcgtgggctgctgcatcgcgtcaagctgacgtaacgataactgaggacctttcttcaaacaattcccggcaaccgtccctacctcgggaggtgaccccttgctcctgcagcaccacgcaccgaccactgccaggaagaccacgaagaccaagctgggaaaccgttgccgatgctcggtgaacacgaggaggcatgttgccgccgttgaagttgaccggctggcggctcgatggggaagtttcggcgcggcttcctttttgtgtgacggtagcagtcgttgcattgcaacaccggtcgttgagttgcggcgtcgacaagctgacagcgcgaggacgccgcgggtttacggccaagtcagatcttgcctggacaggcaagctctgtgctctgctctgcgaagcttcatccttctgaaactcacctctaacgtcgccaagttgattcccgcgcctcgatgaatccgctttggttcagcgggctgcaatgcgagactcgctggtgcaacacgcatctgatacagtgcggtttgaagcggtgacaacttcttgctctgcaccgcgacgacgaccgaaagctgtctgcttcacgccgagcagaaggcgcgatggcttcggtgtgcgttgctgcctcgcacgtctcgacaccggcaccgccggctgcaggttcagccggcaaccttctggttccgacctcgcgcaggcgccgacagcggtgctctttggatcgcctgccaactagatcatgaagctcacggtgagcagcgcaagttgaagcggaaatggctacattcgaattttcaaccgatagtatttattgattctatttcggccaatggcgtgcagcttgactgctggaagttgctctccagcgtccatactcaaggcaagtgactcgccggacgcagcgtatcttggacggcggcgcctgcttgcaatggacgcgtcccgccctctgctgggcggcgacgcgggcgacgaggaggagctcggcgcgcgctcgccggactgcttatccaggtacctctcggcgggcagcaacgctggtctccccaacgggagggcgctgagcaacggccactcgggcaacggccacgcgcacggccagacgccctacttcgacggcaaaggcgacgaggacctggaggaggacaaacagtcgctgtgctgccggccctgcagccagtggccgtgctggaagtgggtcttcccggaccgcatcggcgactacgaggactttgccacgtccgcacaggtgagcgagcgctgcatgacgacacccagtcgaggagattagagactgagcgcttgatgcactttgtggctgctgtagatgggggagatctacgccctgcggcagacagcgcgcgagcagttcgacccgacactgccaggtattgaaggacatagtgcacatagctcaactttggaggaagtggagtgtcactcacacgcagccaatgatgcagaggacgacgacatgctgcagcacctgtggggcggcttgttctccacgctgccttacgagggacgcgtcaacgtgcgctggcgtgacgtcggattccaagtgcgtaggccttgagctcgactttgtcttgcgcgtctttcagcgctgagtttcgccgcctgttgctcttgttgcagaatgacgaccctgcatccgacctccgcacttcgggacgactggcaatacgcatgctgctctacttctctgatcatctcaacgatgagtttaaggtaaggagtgctgcagcatgcacaagatgtaaaggtacgatgctcgctcacttttatctgtgtgttttgttgctttgttgtgttttgcagcgcatgctacgcgaaaaccgcttccctgtgtgtctgtgtgcgctgaacctgctggaaatgctgttgtgccacttgaagctcaaagagccactgcccttagtttgtccatgctgcggcacggagaacgccgaactggagacctcacaacagccaagtcggtctcaccccgagctgcgcggcttcacagcattgatgggcgatgcgtcatcactcgcatcggcagcattctctcatcaactcgcttgcgcggagggcggaccggcagaaatcgcactcgcgcacgtgttcgcgcactcgctgctcgtgatggacgccgtgtggaagcagcaactgcagcgtgacccgaccacgacgctgatgcacttccgtgaagctctggttgagacgcgagtgcggatcgtgtcgttcctctcgcgtcgacgcatgcccctcacgctggcagagctcgatgtatgggggtatcggcagcgggcacggtgccgcagtttccgcaagatggcgtagctctcggtcgatacgtcaggttttgtattaggtagtggtaagtaactaacaagctagcaatcgaagcatacacacggcgagcaagacagctcgccccgcccagccatcgggcttactccacactccagtcaatgggctccttgccatgctctttgaggtagctgttggcacgcgagaaacatttggagcccaggaacggcgcgttggtcttggtggcgcccagtggtgacgggtgcgaggagcgcaccaccaggtgccgctttgtgtcgatgagcgcgcccttctcctgcgccggttttccccacagcaagaagacgacgttggaggcttccttgctgaccttggagatgacggcgtcagtgaactgctcccagccgcgcttcttgtgcgagttcgcctctcctcgacgcaccgtaagcacagtgttgagcagcaacacgccctgcttgctccagcaagacaaacagccgtgtgtagggcgcgcgatgcccacgtcgttcatggcctccttgaaaatgttcttgaggctcggtggcggtgggattccgtggcgcaccgagaagctcaggccgtgtgcctgttgcggtccgtggtacgggtcctggcccagaatcaccaccttgaggtcggagaaagcgcagtctcgcagcgccgcgaatacgtcggccggcggcgggtagatggtcttcttgcggccttcctcgccctccaggaaccgcgtcagcgcctggaaggagccgcgcgagaactccttctgcaacacgtcgaaccacgttgcatgcagcagcgagcgcagctgcgaagtcttctggagatccacgaagcttgtcacgggcagcgtctcgccctgttcatcgtcctgcgctttggcctgctcctcgtcgtcctgcgcctcgacggccgcctcgcttgcctcgacttgggagacctcggtggcgatttcggtcgcctcgatcttgcccggggatccctgctgcgtcgtgcggcgcttcttggccggcgcctggccgaaaaacgagcggatgtcgcgcgtggcgccacccatgtcaacactgcaagactgttattttttggatggctattttttaaaattaattgcgtccgtcgttctcaggctttttttctaaaacaattattgtgcaaacgttttgtcgttttgacttggagatcttttatttacataaggtcaaatcaaatcatgtggtgtacttgaggcagagtctggttgttaatttcttattcccaccgcggcggtgtacttgagacagattccggttgttaaatcgatctcgatttattataactcgaggaatgccgctgaacaatataatgcattgcggactttaccaacatgtagagcatagatatacactaaatttcaagcgctagcattcctgtacgaccaagtagtcgagcacaaaagctcctcgagtacaacatcagggaccattttcgggcgagtgtaatcatgccggttttcgacaaatcacattgtgtttctgaaggacctttacaaaacataggatgaaataccaccatcgttttgatttatcctggtatcggcactgttgattggtagaatcctaactgaatgtgaatgcatgcggaggtgggggggggggggggtcatgggtgccaagtttgagaggagacttctgaagtaatatggcgaaatatgagtcatcagtgctggcaaatgcgctttggagtctataaccttcgcttggaccctttgctttatcctttctatctgtggcggatcttttagatttgagtgacccccacaaattatccttttccggtgtacttgacgcataatccggttgttaaaatcgcaaataaaagaatcgctaaaagacgtcatgcagtttcgacttcagttatacaatctgccccatagctaccagcattagatacgcaaattcgggcttttgctttgactcctgcagtacacagcgcacccaggaaacgttaagctgccaaggcaaccattttcgagagatgatgatgcatcaccacaatggcgggaacagatttctctttttatgccattcgtaactaaaaagcgaagataccactcattctcgcaaaatcccccctccatccagtggcttctgaatctacggctactgctgtcgtccgcgcacggctccggcgcgaggaactgttgatttacgtgattgttggtgctggccggctgctggtgctgcatctacggctactgctgtcgtccgcgcacgcctggggatcgtgatgacgcgatgcaaaagtagcggaggggggggcggacatggccttctccacgaggccgggggtcgagatggactcggacgtccagaaatcgttgtcggtcgtgctgagcaccatcaaggtcgacaggttgttcatgagcgagctaagtacggtcttggcctgctgggggtgagccgtagaagaaacactggagcgtggacttgaccttgaggctgaagcggatgaagatcaggtcgttgttgtttccactttgagcccacttctgtgtaccgaggaaggcgttggcgttgtcctcctgagtcggtttgatgctcgagttgaaagcgatggtacgcgcttcgaaggaggctagatcgtcttgaccttgaagctcagcaccccggtcatggagctggcggcgccgcgcacggtcctcgttctgcttgacgccggtggccacggtggcgccgttagctagggccacccgcaagacctcaacgttgtccagcactgtgccagcggtacgcgagagggtttccaaacccgagcctgccacaccggtcatgtcgacgtcggggcagcggccgttgggtagagtgtgcttaaactctcccatgcacactgtacttagcggtctccgagatcatgacagggccgccgtatgacagcagaccagtggacgcgtcgcacttgtgatgcattgacttgtctagcctacggctgtaacttcaggcttagatgccgactcaccatactcgcgcagtggcatgttcccgcagaccttcgtcgtcactagattcatcgttcaccgagtaatacgtgcgcgtctcggcgattgagttgccggaatctcaacgctggcattgatgattggctgcaattctaattttgtgattggctgatatcaaaacggtggtgcatgacacgacaccagcagctggaagacatgccgaaatggagccgagacgctgttttgtagcggtgatagcaggcttacacttggtagctgcgcttctgcagtagcactatccctcctttgaaatgcacgaaaccacgaacgggtatggctgaaggactctcagcggatcttttaatacttgagctcccccacaaatatgagatttccggtgtacttaaaataaaacgaggtcaaaagaaagggacagatcgatctatttaggccggctaatgactcgacctacgacaagccaaatcacggttcgacgtgtggatctgggcataacgaggtcgatctacggtaaatcgatcccttttgcgttttcaaaagcgcaattcgacgtcgatcaaagtaaaacgaggtcgtccatgctaccacctctgttttttgccctgatttggggaccggccttcctcgatctaggccataaaacagggcgacattctatctgcaaagcaccataaaatttagcgtacatgtacccaagagtataccctctaccctgttccagaaatgtttcctgttatcgagcgactaatctataaaccgtactcgagtacgaataagtcgtggatagtcaatcggcgctaagtagtgcacatacaccatctcctgcatgatctagcgcatctagtacggattagcattcttttggcacttttagaacgtgccatatcggagccggcttcgaaacaaaaccctctttgattaacgactaagtacgaacactaactgggtcattcctgaaaacacaattttaatgcgtcgtaaaggtgaaagaaaacgtgcgtgaagcatttttgcgattccgtgccgacactttttgtgcagttgccagaagaggttagtgtctcttacaaacccaagtgttttctctcaacgaccagcgggcaggtgtaacaccacgccagcagtagtcaagtcagcataatcagctggctaggtcgcctcgctggtctcaatcttcacatgaaccttcgactcaccatgggcgtcgctgtcggggtcgccacaaaagaccggagagagtgccgagcggagcaggaccgtatgggccggtcgcttggtgctcccacccagcaagcaagctcatcgccgacaactggacatacagtcgggaccaccgccctaccatccatcgcggagccaacttcgctgctggaccaaggaaggaaggagaggccatcgacgacccgctgttcctggaggtcattccgctgagcgagctcgtgtataaggcgacaacggtgcacagtgcgcacttcgacgcattgaaggagcaaccgtggacgctgctgtccatcgagacgggcggttgcacggagggctgcaagtactgttcgcagtcgtcgctccagaagctgttccccaagcccgatcataccaaaaagatacaaaaaggaaggaagtcactgcttacggtatcgtgactttacattcgtcttgatatgctgatacgctatgaacagtagctgtggggaatatcggaaatggtactgaccactaccgctgctattgccatcactcataaccactaaatcatctcgagtgaacgagccagttgagtttcgtagatgacatagaaaccatgctgaagcatcaccatcctcgattagcgctatacctagagcaacaaggacaatattgtggctcggacggagcataatagcggaaaacagggtaccctcaatattatactagaggtgacacgcgtctaacgagaatccgggcaaacatgacgggaaaaatattaatacctgttgctcagacactgactcacctgttgccccagattttgtaggaatttctgttgcccaggctgaacacctgttgccgagtctgattatctgttgctgttgaatccaacagaaaactcagtgctgaaaacctgtttcaagttttcagtgctgaagttctgttgtctattttagagtggaagagctgttccctattttaagtgcacacactccttctcgctctcgaggtttcgcagcccccctcctccttcttccttctcactctggctctagtgcgcgacccaccacatccccagcaccatggaggcactctccttgcctgtgagcgatgatagcgacagcactgaggtgttagagtatgatagcgaccttgccgacgaagacatgcacagtgccaccgcctcggttgaagatatggaccaaggcgacgatgcggagtgcagcagggctgccgtagctttagcgtcagaggaagacgtaacagactcacagagtctcagcttaagatagcccgttctaattccagaacgtacgagtccgtacaccttacggactccaagagtcaacccttaactcttaactgtgtgaatctcaaactgaatgtatttccctttattgcagcaaagccgcctacggtgtgaatgtatccggttcactatctagcatagtgaaccctagtcatatgcataatcagtggctctgaatccatgtactggttctcctactgatttaggttagacattgtgtagccacttcgtaacccttcgggtgcagacatgtaacagggttacacgcacaagtggctacagtcacttgtaactcgacgtctgttagaggtttgaaaaactttctcgaccttgatgtagacacaccaaaggctacatacatttaggatcaccacgacgggtggtccatagagacttaggattcctattggctgagagcagcatctcttagccaatgagcgacatgcatagcataggaattctgccaaccagccgttggcagactcctagtttagaatattacatttagaggaagtcagaaacataaaacaaaaatagcagttctcattttaacccaaaaacattatttggatcgtttatttagattaatctatactcggaggcccgggtataattaactctaatttaaactacgctacgcttcctcacacacgtgcgcgcacgtgtaactaaagtagtgagccaaagtaggcccattacacctggtagcactttgtagtccgtccaacgaccgactacctgagttcgtacgtcaccgcacgaacgcggagctaagaaccttcccatggatacggaggtgtccatggaaagtccactacgcctgcaactcacgttggacgcgctgactgtccccacctgtcggacccagagtgggaagctcttcaacgactgtcaacagtcattggtgaggcggctgtagctacgatgctgcgtacgctaacgccgacagagcaacatggtgttgctctgggattcatcatgagggagcagcgagatgctgcttcgtctaccacggtgtcgtcggggacgacaccgcgcgcgcaatcgctgaagctcagcgtgagcaattacgttggaagagagggcgagcctctcctccgttggcttggcgaactcgacactgccatcgcggctcgacgtatcgtcgacccgttgtccaaggttgcgttcgccatgtcatgtcttggcggacgagcgagaagttgggcgtatggacgctgactctcggatcctacgtgctttagcacgtacgagggtttcaaggaagagctcagacaagcgtttgagccaccgcaaacgagttccggtcgagggcggagttcctcgacctgcagcagggcaagcatgatgtccatgcttacgctcagagagcacggtacttggtctcgaacatcgtgaccaatccgatcgacgaggcgaccaaggtcgtcacgttcatgaaggggctgagagatgggcctgtgaagacctatctcttccgtgagtacccgagtactctagaacctgcaattactcttgcaatgcaggaggagtttagtctgcggcaggctaagctgcatgcacatgtgccgaggccacagccacgcccggtagtgaggacgggaggcccagaacccatggacctctcgagtgctgcaactgctggaccccagcagtcgcaaggaaacaatgtgcgatgctaccgatgcggtagaatcggtcactttgctcgggagtgcacggcccccgtgcaccagcagggtggctatcgcggtggtgccgggcaccgtcgcaaccaaacaaaaaacgctggacgccagtaggcgcggggcgccctactggtaatgcagttccgcgtgtcgaccttggacacgcgacactgaggaccgcagcccccagtgagattcattctcgctgcaagaaccaagatgacaagcatatccttgtcatcctgaacgtgaactcgatgagagcaagcggctctcttcgtgctttggtagattctggcgcgtcgaagaactttgtacgactgcgaagtctatcaaggcttgacttcgaggatttaaagatagctcgaagtattttggaagtacgactggcaacgggtgccgtcgtgaagactggtacgcgtgcgcttcacgtatgaagatcaagagtttgtcgagacctttatcgtcctggatctggacgataagtttgacattgtattgggcatgccgtggcttgcacggcatgatccggtcatcgattgggagaagcgcacactcgtgcgcttcggtcgcgacagcggaacagtgagtgatggccctgttgccgcttcgcacgcaccgacaggtgcgcgcgactccccactcgagacagcgcctaatgccgctgtcccggagcgccctgggcgcgcgcgagcacgcgcgtaagagcagcaagcgtcggcgtcgccgccgacggctgaaggagaaaatgtgttgatctcggagatcgacacccgcttttcagcgaatcaggaagagtctccgacctcaaggggcacggatgacgcagacgagtcacacgcctcagccgtggaggctgacgcgaatctgattggatcaattttggtcaataataagagccaaggtgacgtaacgccgtcgactccgggagtcgatggcttgggtgaatatgattcgtcggctcggggagccgacgcaccctccggaatgggggtctccgccaatggttggcgtcgaggtattgaaatcgcatcgactccggcagtcgatggcttgggtgaatttgattcgtaggctcggggagccgacgcaccctccgtaatggaggactccgccaataacaggcgtcgaggtgaagatggcgtgtcggctccgggagccgacgctgcaggcggtgcggacggttgcaaacgttccgcaccggaaaaacttgcatgctgtcgtgcagccgggctgcacgacgaagcgccgggcgaccaagccgggcttgaagtcgctcgcccgcgggatgaacccgccggcggtactgaagaagaacacccgtccacggctgggcctggacgaggtcaagaaccaagcggagccgggctccgcaaaacaagaatacggcgcatgcgaaggtcactgcgcaagtctcggcctggggccgagacgctacaaggaatgtctgccgggcagacggaggctgagaagccggacgttgagacgttgaacgtcttgacgcgtacctgtgccgggttccggtacagggagatgactctcgctaaccctccgacgcaagcgtcggagttgactttgcttccagtcctgagctggaagcgcttcgcgcgtgacttgcacgatggacgcatcgaacaaatatgcattctctcggacgccgagagaacgaagagcgagaacgaagaactgaggcagctcgtcattgtgagcgcactgagggcgaggacactctcagtgcgaagacgaagaaggagcgcattgaagagcagaggtgggactcgttgaagaggagtccctactacgaaatcttgcgggagtacgcggacgtacttccgggagagatccctgcggaacttccgcaggacaagggcatccagcacgagattgatctcgtgccggggacgaagtactgtgtcacgcggcagtggccactgccgcgagagcaggtcaaagcgatcgacgacttcttcgaaagtcgtcgcaaagctggacaagtgcgggaatcgaaatccccgcacagtgctccgacgttctgtgtcaagaagccacagggcggctggcgcatcgttcatgcgtataacaagctgaacgatgcgacgataccggcgcagacgccgatacctcgaaaagatgtcatcatcgattcgatggccaggagcattatctacagtgctcttgatctgtgcgatgggttctatcagatcctcatgtgtgagagcgattatccctctcacggcagtgagcacgccgagcggcatgctctgggagtggctagtgatgccgcagggtctgaagaacgcccctgcgaccttcaacaggtgcgtgacgcacttgttgcgctcggtgcgcgacttcgcaccgagctactttgacgatgtgttcgtccacagccgggctgcggacgggatgagcgatgttaagatgcacaaggtgcatctccggaagctgcttgcgctcatgcgcaagcacaagctctatgcgaacctgaagaagtgcatcttcgggacgagtgagataggtgtctcgttgggaagaacggtgtccggcctgaccctgagaaggtcagagtgatcaatgagtggccgacgccgccgaacgtcaaggaactgcggcagttccttggcttggccacgtacttgtgcaagtacgtgaaggactacgcgagcatgatacgcccgctgtcacagctcctgaagaaggacgccgagtgggtttggactgctgagtgtcagcaggccttcgatgcagtcaagcggggcttgactgaggcgccgatcttggcggtggccgaccaagatcgcccattccacgttctgtgtgacgcatccgacttcgcaatcggatgtgcgttgatgcagcacgatcacgagggtcgtgatcgtgtcggctactaccaatcgcgtcagctgaagccagctgagcgcaactacccggtacatgacaaggagctccttgccatgaagtacgcactcgcgaagttccgagtgtatctactcggaagcaaaccgttcgtggtctatacggaccacgcgtcgttgcggacggctgcgaagtcgccgcacatctcgcaacggatggcgatatggctctcattcttcgcagagttgaacttccgggttgagtacaaacccggaagactcaatgtggtggccgacgcgctctcgcgtcgacctgactacgccacggctgatgccgacgtcaatgcgattgacgccatgccatcgagcaccccgacgtcgtcactgtttgacgacgtgaaggtcgcgtacgcgcacgacgcggacgcgaagctcttgctggcctacggctcagcgccttctgacaaagctcgtcagaagctgccgaagcatcttcgtgctcgtgcacgacgggttattactctacagtgcagtcgacgacaacgcggaccgcgttgtcgtgcccaatgaccatgacctgcgactcaagatcatgcatgagtatcacgatgcaccgactgcggggcatccgggccgcgagaagatataccttcttctcacacgagacttctactgggcccaccagtacaaatgggtgcgcaagtacgtccgtgcttgcgaggtttgtcaacgtgtgaagcctgcgcctttcgcgcaggttcccttgcagtcactaccaactccacgggagtgttggcagtccatgtctttggacttcgtgttcggtcttcccccggacagccaggggaacacgggcgttgtggtctttgttgaccgcttcagcaagatggtacatcttactgcagtacccgctgaagtgactgcgaaacagacggcgcgtctgttcgttgacatggtgttcaaacaccatgccatgccgatcgacattgtgtcggatcgagacccgcgcttcactgcacacctttggcaagaagtgtttacacttcttgggagtcaactttcgatgtcgactgcggaccatccgcagacggacgggcagaccgagcgcgtgaaccgcgtgctcgtagacgtgcttaagagctacgctccctcgttccaacactggagcgagtgcctgccgatggcggagttcgccatcaacaactcggtgcatgcatcgaccgggcatacaccgttctacgtgaatgccatcaggcacccacgcctcccgagtctactcgggatggtggctccttccttaagtgggggaggatctacgactgcaacacagcagccgcagaatgccgctgacacttgcacagtgtcagccgcgactacgcgcaataaggagaagaagcacgcgtctgtgccctgcacagacgccgacaagagcaaaaagacgaagaagaacgggtctgtgcagggcacagacaccacgaagacaaacgcagaggccgggcctactgctagaaacgagctgaacgagttcagcttggacgcaatcaacttcgttcagcgcagacaagccgtcactcggtttgtccaagacgctattacagcttctgtcgaccgacagaagctgaacgcagacaatgttggtaggtgctacactaatgaattcaagaagggttcattggttttgttagcaactcaatacctgcctaaacatgcagtttccgacttcggggcgagcaaggggcgagcaaccttccgcgcttcatcgggccgttcacggtgttggcacggcatggcaacgcctacacgctagatattccatctatcatgcgcctccatccgaccttttacgtcgggcggctgaagccataccggcagcacgagccacctagctcggctggcccaaagcggaagccccagcgggagcgaacctctgctccagcgcgtgaacgcgctgggccaagcgtgcgacgcgacctcccacgtcgacagagatgtccgacgcggtgtgcgaggcctgagcaacttgagctctcagggtcgccatctcctgcttcagagcggcgaactcacggctctgaagctgctccacagcagcgacccgctcctcgagcgtcggaccaaggtcaaccccaggttgaccatacccggggcgtgttcccaccaccgccgcctccgatccgcgacgcccgcggctcaacacgctggattgttgagcgtattgtgaaccatagtatcccgaaaacgaaccggcagccggttcgttatcgtattcgttggagagggtttccgccccaccaagatacatgggagccacgggacgtcctgctgcaggacgttccggaaatggtgagggagtacgaagctcactacgcactgccgacgcgaaggtagtgcgagtgctgtggtcacctacagcgcccgaggtcccacgatcgtcgcgttcctcacgtgccaagaacttggcacggagatccttgagactcgcatgtacacgaatcgtcgtgtacccgtttagttcgcggtcgctcaagcgcgccgcacccggaagacacaacgtgcactgatggccttcgggcacagcgcatggaataccagcgtccacagaggatctgtggagctgctccagcctcccgcgcgtcgagaatgtctcgcagcgctcacgggcatgcttaacccgctcgcggtaagcagccggcttcttgttgaagttctcaacaaaagcattccaactttgacaaagtgcctgccactcaggcactttgctgcgagaagaggtcttcttgctggaaaagtatcggagctcgtgaaagagtccgatatagtaatcgcgcctttgattcgttaacggatcaaagtgctgctcctccgcaacagcatcgtcgtggataccgctgcatacgtacagcgggattttgtttggaggcacagtgttgcccacacggtctgcgatctctgacgcagacggcatcaacggatcgcgcgctgcctgagaagcgcgcggatagcttgaagtcgccacatcacgtggagagcttaaagccccagcagcagagagcggagtttcgctctcgccgcgcgaacgcttcgagcttgaagcgtccgaatcgtctccttcacgagggcgtctcgacccggcatgcgggtcgagactatcactgtcgatagactccttgcgcttgctggaagaggcctccccctcttccatctctacgtcgtcactcccatagtcaacggcgtcgttgactacagaggaaccttcgaggacaatctccgactgagttgtccccgacgcggcctttgcagcgagctcgtcgcgctttgcctgctggcgctcatgatactgagcaacagagaggttaccctctgttgcggcggcggtcttcttctgcggcgagctcattgcggagtgagctcgagttttctttctcccaacgtgaagaattgacgaatggtcaatttcctgattgacgtgccgtgactcggcgcgtctaaccttaagggggggatggtgtaacagggttacacgcacaagtggctacagtcacttgtaactctaacagacgtcgtgtctgttagaggttcgaaagactttctcgaccttggtgtagacacaccaaaggctacatacaattacgaccaccacgacgggtggtccatagagacttaggattcctattggctgagagcagcatctcttagccaatgagcgacatgcacagcataggaattctgccaaccagccgttggcagattcctatcttagaatattacatttagaggaagtcagaaacataaaacaaaaatagcagttctcattttaacccaaaaacattatttggatcgtttatttagattaatctatactcggaggcccgagtataattaactctaatttaaactaagttacgcttcctcacatacaagcgcacacgtgtaagctaaagtagtgagccaaagtaggcccattacaaaacgtgtctgcggcaccaacgccatcatggtggatcaatgcagctgttgtttgtgggataacggtggtggtgaacgtcgcgtttgtcaagatacaggggaaggatgtcctgctctcgcagcaaaaggcagagattgagctgagctccttgtagatcgccttcgcaaactgctacgagttgaacgcgtacctagctctgaattccaatctagcgctaatgacacgatttctatgaagtactggctcaaagagcaacacttgctcgagtttattcaagaccaggggacgttcgtcaagaatcacatgaatagcgttgcagatgccgacaaaaattcgattctgaggcagcttggcaagtttgtactgcatctaattgaaggtaaggagcatgtacaagctgagcgagacagcaacaatgacgctgccgcatctccaactccgccagtaataccagctgagcttgtcacagtccctcctcgccagtttgcagaagatattttgaatcctcgccgcgatcaattggctttgttttggagtaaggcaaaaattgaagccgttgaacgggagcatcgagagctgtgtcaagccaatctgcttgatgagatggttcgcacagccctggaggaagaatcctatgacaccagcttcaacgacgcctgggattcagtgcaaaacgctgctgctccaaagatattttcacatctctgccagttctgctgcggattggcaatcgtattcgcgaatacggcgtccgtcgaatccgatttttccgtattgaagtgtgaactgaacgaccgacgcacttcgttgacttctctagcccttgaaggcatcttccagactaaacagttcgatatgctagaaaaattgtattgtgccttgcagagattttgcccttcgttttgacctcggatatcgtagtggtcggaaaagataaaaccgaccttagtaggggtaggtttagataactatgaggtcaagtcgctgttttgcctcccccaagtttatctaaatccgaccgcttcggtggctgtgagcacacgggcaccttccatttgtgctacgctcgctgcattcagattgtaagcttcctgaccctgtctgcttgctgcaagatgctaccgacaagtactaatgctaacactatttactcatgtgtttgcaacagactgctgtagagataatgcgatgaaggagagcattaatgctgtccaagtaggcgcgttcctgtcgccagcaaagcagcgtctcggcgtcaacgggtgctccaccaggtcctcactagcctcctcggcgtaagtcacgccggcgccgttggtggagatgttggtgccaaggatggcacgggttgtgggttcgtgtaggagcgctcgtgcggagcttgcggcctatcagcacgggggtgcccggagaggcgttcagagcgatcacgacggcgaagagtagcatgagcttcacaggttagcgggttgtcgtcggcggcagtcgacgtgcagctgccagtggacctggccccaacgcgaccgggtcgatagacgtgtggtgcaaggagctgagggcagcgctttagtcggcctggccgactcggccctcacgcaactttatggtactgccgtcgaggcggtaaaagctgcgagcatggcgggtaggccggcggcgcgaatcgctgtgtactcctaggctagtagtagaaggccacatagcattttaatgtaaccgaagcgaagcaaagttgcttttttgaaactgtccatgtaaagcttctgtttcttctgcataagtctctactgtacgcctgcgtaggtgacgtcctttcaacttgacttcttgctcgtcgtgaacgacgctatctatcgtgtacctgcgagacgcgaattcgttcgagctggcaagcagctttgcgtgtgtagcgatcgaaacaagagcacgagcttgcagcaccagcttgaccagtgggttctacaataagagtatcctgatgtgtagtagcgccggagtcggagtcgccacggagtcgccacaagagcggcatccgatatggcgcgacggcgcgacagccgcatccaatatagcgggagggcggtcgttttggccgaattaaaacggcaattccgacctgcttgatcagctcgaccgaggtttaacaagctaaatcgtacctccacctggagtccctcggctttatctctgagctgcaaattatatccgacccgatatatcctacttctgagcatcggaattgccaaaaaatttgcaaggcacaatagtaaaatgcatactttatttccttaaactggcactgtgccgaaataaacaaaacaagagtgccgaaatatagctaatccggcaggtgccagtataagggaggtctgcctttaagacagtgccttaccgtaagccctttaaaaagggctgagcaaccaaaagactgcacatccgtaccatatatatggtacagtatgctgtacccatggtacaccctacgacagtaatgccctcacctcggaataaaaagcgggttcccaacgccatgactaccgggggattgtctgtagttgcatttttactcatgtacacgcaacgtgaacgagaaagtagagagctagcatcacatgccacaaaagcactcactattgtatcatctaaatatcagcttggtattttactgtaggcaatcctagtttcccaacaataagcaaacacaacccacaactcggggtgttaccccgtatccgggtgcatgtacaatgggagcagcaaagccaacgccatcacgcacagaccagcgatgacgccagattcatcggaacagtcgttggcagccctgcaaatgggtagcgcgagctcaccatcgcactcacgcgatcgggtgcaagtccgccttggcgaccagctggcgcggtgccacgcgagactcgtcgttcgggatcagatgaaccacacttcaaagagctacagtaacctcggggcgattggaagcaaggggcagcggcgagaaatgtctacagatgatggaatggcaaagttgccacgagctgctattgttggcgagcaaagcgcgctcgttgtcaggtcaaagttttcagttgctctccgcaacttgcaagtggacaaaagaaacgcatctccccctcgggaatcgagttctggaggttggacacgcgcctccggccgtataacggcccaccaccccaaaagcggagcaaagtgggatcatttcacttattcgcggaggttttcgcagaaaagctgcacatttcgccaagtgccattggttgatattggcaccagccaatcccgcaccgccagacacaagggcagagtgatgtcatctcaaaaattgcgagcttcgagcgcccactcgccgactgacctcgaagcaccaagctcctcgccccgatggtcgccaacatggaggagaccaccagcaccaccacgaccgataacgtcgtgcagcgccgccccaacgctgctgctgctgctgcaactgagaagcagcctcaggagccgctcatcaagacggagggggacggcgagttcgccgaggaggagggcgagctgttcgcgcccgaggagcaggccgaggccggcttccagtggtccgaggtcgtctggtacaacgtgttcgtgctggccgcgtggcacgtgggcgcgctctacgcggcgctgttcgttatgccgggctgctcgctgtcgcagctgctggtgctgtggatcctgctctgggtcgtggccggcctgggcatcacggcgggcgcgcaccgcctgtggtcgcaccgcggctacaaggccaagctgccgctgcgcgtcttcctcatgctgtgcaactcgatggccttcgagggcaccatcttcgagtggtcgcgcgaccaccgcgtgcaccacaaggcctcggacacgacggccgacccgcacaactcgggccgcggcctcttcttctcgcacatgggctgggtcatggtgcgcaagcacaagaacgtgcgcgccgccggcaagaagctcgacttctccgacctgctggccgaccccgtcgtgaccttccagatgcgccactacatcaagacggtgctgctcatgtgctacctcgtgcccacggccctcggctactacctgggcgacgcctgggccggattctgggtgggcggcgtcttccgccacgtctgggtgctgcacatgacatggatggtcaacagcgtcgcgcatttcttcggctacaagccctacgaccgcaagatccagcccgtggagaacctcatcgtgtccatcggcgcgctcggcgagggctaccacaactaccagtacgtgctgctctgcttcggtctccctggccgactttccatctcttttgctaacagtattgctttgatattgcagccacaagtacccgtcggactacgcgacgagcgagtgggggctcctgagcggccagtacaacccgaccaaggcgttcatcgacttctgcgccatcatcggccaggcctacgacctcaagcgcagccgcacggccgcccgcacccgcgagcgcgtggccaagatggtgcgcgaggagcgtctgaagcgcggcctgagtccgtccatgtcgtggtgggaccgccagctgagccagctcttcttcggcaagtcggaggcgcagatcttccagtaactgctgtagtaaacgcgggaagggcgcgcgtgcccgcaggccgtcagttgatagaagctgcgtgtagtggcagctgcatcgagcggcggcgacgccttgtatggatgagaaattaacaggaaaagcctgatgaaatgcagtggtgcgtgtacgatcgatcgattgctgctcccaacgtactgatcctcgccgccgtgtgtctatgggccattctgaaccgagaccacttggtctcagtatgacgaacaccgggctggcacttcaacgacgcgagccaattgaaaatgcgaggccaacaacaacggccgaacagtgtcgccattctgctcggagagcccccgctcggccgcactgcagcctcgagcgaagcagtgctccactttccgtccttgccttaccccacggcagtgaagccatcactggcgtgcacgccgacagctccaactgggtgctcctgtgtatgcagctcgattcagctgcggcgaccagcatgcagcattctctcttctcctggcgctttagcttggcctgggctcttccgaggcgccaggagcagcgacaagagcattacgggcgcgaacgagacattttcagtcatctgtacccggaaccattccttccttggcccggatagctacagtacatactgctgcaacaatctcgagtcgagcaagttgttgatgcttggcatgtaccaacagccagcacttcaacaaccagctcggcatcacgggggtaaaagagctgagctcgacgccctcaacttcaggttccattcacgttgtcttcagtgcggaagaccaccgcaagcttcgccctccgaagcgcggcgacttcctgcaagcaccctccacgagaaaaagcccagccgatgcgtgcatagcagattgccgcctctcaacattttgattgtgaaacaacaagaaactcaagttcacttgctttttgtatgcccccattcggccggcaaatcttcacacaatccaattcgcggttaggacacgaggtgatctcaacaccagcagctccagccaacagcagcaacagccagcgccagaacccagtcgccccgccccgcccaatgtccctcctccgcctcactcgccgactcgccactcgcgcctcagcttcctctcctttctccgcccaaatggtgctgcgctccctctcgaccgccgccgtgaacgacaagctggccacgctcaagggccagaacttcatgtccacggcccagctgagcaacgacgagctcatcggcctgctggccaaggccaaggagttcaaggccacgtactccaacccggagaccaaggccacggcccccaagccgctcacgggcgagatctgctccatgatcttccagaagcgcagcacgcgcacgcgcatctcgagcgaggtgggcatgcacctgctgggcggcaaaggcctcttcctctcctcggacgacatccagctcggcgtgaacgagaccatgcgggacacggccctcgtgctctcgcgcttcaacagcatcatcctggcgcgcgtctacggccacaaggacatcctcgagctcggcgagctggccacggtgcccgtggtcaacgcgctgtcggacaagtaccacccgctgcagatgctggccgactacctgacggtctacgagcacttcggcaagttcgagggcctgaccttcgcctgggtgggcgacggcaacaacgtgctgcacgactacatgctggccgcccccaagctcggcgccaacatccagatcgccacgcccgtgggctacgagcccgacgccgacgtcgtggccgagaccaagcgcctggccgagctcgccggcaccaaggtcgtcatgaccacggaccccgtcgaggccgtcaagggcgccaacgtcgtggccaccgacacgtggatcagcatgggccaggaggaggagtcgcagaagcgcctcaaggccttcgccggctaccaggtcaccaacaagatgctcgagagcgccgctgaggaccacatcttcctgcactgcctgccgcgtcaccaggacgaggtcgacgacgaggtgcggactgctgcaactaaactgctttgccattgacttattgctgtgtgatgagactaacgatacttatgatgttcttgtattgtgcaggtgttctacggcccgcgctcgctggtcttcgacgaggccgagaaccggctgtggaccgtcatggccgtgtacgccgcgctgctgggcaaggtctaagctggcagcgtctgtaggaagagcggaaccaagctctaggtgtttgtctcgctggtaaatgaatggagacagccgtatattcaagtcaccctcaccctcttcacccgcgtcagcttcatccatcgcctacggttgaattttggcagacaaacagcgatcgtcgttacatatccaaccgtgaagcgccggcgcgccgccttgcagggtcattcgcggagacgcctcggagagagagaggaaaggagagcggccagctatagcaagaaagctcgtgtgagtctcccagcgcagcgatgggcggcgacggcgagcgagcgcccaacaagaacgaggtgaacccgctcaagtacatcgagcagcgggtcgcctcggcgttcccgcaactggtcggccccaagttcaccgccaaatacgccaccgagccgaacgagtacgtggtgatggatgaccctttcacttccccacttggtcaattcaccatttgcgtcttgtgttatgacgacaggaactgcgtcaaggagttcctcgagaatgaagacgtgaccatgctcgccttctcgggcgacaacgtcatcgggtccatcaagatgcccggcacgctgccgcgcggcaagaccgtgtgcttcaccaagttccacaagaccgccatcacgtccaagaacgtgctaacggacatcatggtgaacgagctgacgcccagcagcgtcgagtacctcgagcggatggtggccgaggtgtacctgccgctcttctccaacgtggccaaccaggaaggctggggcgaggtggcgtccaaggaggtcgtggacaagttccactcgtacatggcgtccgtttccatcatcagcggtgccaccaagggcgagacgtgtctgccgctgcccccgatcgacggcaacgccaccaacctaagcaacaaggtgtcgctgctggaagggtccatcgtcatctggaccaagcagatcaagaacgtgctcaagcaggacccggaggacctcctcaagcaggggctgcacccgacgcccgacgccgagatcgagttctggaagctcaaggcggccaacctcaactccatcttcgaccagctccagtccaagaaggtgcgcaagatcctcacggcgctcgaccggtccaagagcacctactgcaccacgttcgcgcgcctgtgcaaggaggtcttcacggcgcgcatcgaggccaacgacaacatgaagtacctgcgcacgctggaggagtggttcatccggctcaacaacgacgaggacttcccggcgctcacggagctcttcaagcccatgctccacatcatcttgctcatctggaagaactccaagcactacaacacgcccgcgcggctcgtcgtgctcatgcgcgagatctgcaactcgctcatcaaccaggcgcgcaagtacctgagcggcgagctcatcttcgcgctcattgaccaggacgaggccggccaggccgtcgagcagctaaaaaccacgctgcaggtgtgctcggccttcaagagcacctacttcgactacaaggccacggccaacgccgagtgtccgtccaacccgtggcgtatccagggcaacgcgctgttcgtgcggctcgacagcttcctggagcgctgccacgacatcctcgacctcacgcagacgatcgtgcagttcagcaagctgtccaagattgaggtgggcggcaccaagggcaagacgctgacgctgagcgtccagcagatccacgccgacttcaccgaagccgtcaacacattcaaaggcgtgtcgctcgacatcatggacgtggggggcgcctccaagttcgacgacaacttctacgacttccgctgcaagatcaaggagctcgagcgtcgactgggatccgtgctcacgcagggcttcgacgactgctccaccatcttcgggcgcttcaagctgctcgactcgttcgaggggctactcaaccgccccattatccaggacgagctggagaagaagcacgtggcgctcgtgcagagctacggacacgacctgaagctcgtgcaggagctcttcttgcactgtcgtgacgcgcccccgatcagttggaacctgccgcccgtggccggcgctctcacgtggtgtcgtggcctggtggagcgcattgagcacccgatgaagaagctgcgcgagctcaaccagaacgtcatggagcgcgaagaggccaaggaggtctacaaggtctacggcaccatcatggcgtcgctgcaggagtacgagaaccagaaggtggaggagtggagtcgcgacgtggaggcgtcttcgcaggccaagctcaagtacccgctcttgctgcgtcacccgcagacgcgttgcctccgcgtcaacttcgacccagcgctcgagaagctgctgcgcgagatcaagtaccttcggctgctcaacatcgaggtgcctcagtcggcgctgcagatctccgccaaagaggagaccttccgcaagtaccgaggcgagctcatgtacatcgtggagccgtacaacgccatgatcgagggcattcacccgctcgaggagccgcttgtgcggcggcacatccagaacatcgacgcgtgtgccggccgaggcatcgaggagctcaactggaagagcgcgggcatcgactcgttcatcgacgagtgccgcaaggccgtggagggcgcgaacgagatcgtgacgaaccttaaggacaacctcaacacgatccaggacacgctgggcgcctggaacgtgcctctgctggagcgccaggccaagcccgtggccgtgagcgagcacgagcgccagcacaagagctacatcgtgcagcggacgctcaagatccgcgagggcgcagcagaaatccatcgccgcctgaagcagtccaacacgggcatcgtcggcgtcaacagcgcgcagtggaaggcgtacgtcgactatgtcaacaacattgtggtcaacggggtggcccgcgtcatttgctcgtcgctggagttcctggccaagcagttagacccgagtgggggcaaggacggaggcggtgaacgagaggggccccctcgagaaggaggctccaagtcgaccaaagaccagacccgcctgcccatgctggagatcaagctggacctgatcgcgaaccgcgtgcagttcaatccgagcatcggcgaaaaccacggcaaggggctgagcgacaccatccagatgtggatcaactcgttctttaacgtggctactgccgtcaagcgcctcgactccgatgggggcggctcgtacttgaaggaaatgcactcggacatgaccatctccatgatgctggccacgatcagcgagtaccaggaggagaacgaggccatgctggccgcctttaagcgcaagtacgacggctacggctacctgtgggagtcggacatggccgctcacttccagaccttcctggccacggccacggtggcgggcgccaacggaggcgcagacatgctcgacctggagaagttcaacgccgagatcaccaagtacgagcaagtggccagcgagatcgagaacttgacgacgcccacggacatcggctggctgcgcgtgaactcgcagcccatcaagacggccatgctcacgtgggtcagcaagtggatctaccagtacacgacgtacctgcaccagcacgtggtgaacaagctctcgggattgcacgacttcatggagactgtgatcaaagggctggaagagcaggtcgtggacaagaacaaggacgctctgaagcgcgtcatgacccacattcgagacgtccgcaaacaaatggacgcgacgaacgagctcttcgacccactgcgagaggcggttcacctgctcaagctgcacggcatcaacgtggaggacacgaagatcggtgaccacgcagtgcaggactacctggaggctgcccccatgcagtgggaggctattgtgaacaagacgttcaagaagaaggaggagatcatgcccctgcagatggccgaggtcgagtccatcaaggaggagctcgagtccttcttcctggacatgcgcaagttccgcaacgagttccgaacgactgctccgttcagcttccagggaacccctaacgaggcctacgcgcagatgaacaacttcgcgtctgcgctccacaagaagatgcagcaggctcgggagttcaacgagatggaggagctgttcgagctgcaggtctccaagtaccaggagacgacggacacgctgtacgaactgcagcagctcaagaagtgctgggatctgaaagacctggtgctggccaccttcgacgactggaagagcacgctgtgggcgagcatccagacggacacgttcgaggggtacacgcgcgcgttcatgaagcaactcaagatggaggcgaccgagcaccagatcatcaaaggctggcaggtctacaaggacacggagcagctcgtgaagaacatgtcgacggtgctgcctctgatcaacgatctccactcggaggccatgcaggaccgacactggaaggcgctgtctagcatctgccacgtcaaggccatcgagcccaaggaccccaagttctgcctggccgatctactcaagctcaacctccacatgcacgtggacgacgtgggggagatcgtggagacggccaacaaggagcagaagatcgagaagaagctcaagatgatcgaggagctgtggcagcgactcacgctcgagtacgtccctcacaaggactcaggcacattcgtggtgaaaccctccgaggaagtggtggagtcgctcgagagcaaccagctcgagctgcagaccatgatcggcatgggcaagttcgtcgagttcttcaaggaccgcgtgctggcgtcgcagaagacgctcggccacatcgaggaggtgctgaaggagtgggtgtcggtgtccaagcagtgggcgtcgctcgagagcattttcctgagctcgcccgatatccgcaaccagctcccagacgacacgcgcacgttcgagtccatcgactcgaacttcaaggacctgatgaagaacgcagtgatggagcccaacgtagtgctggcctgctccgtggacaaccgtctcgagagcctcaaggagatgacggcaatgctggagaagtgtcagaagtcgctgaacgagtacctggacaagaagaagaagatcttcccgcgcttctacttcgtgtcgaacgtggcgctgctggagatcctctcgaatggcaacaaccccaagaagatcatgccgttcctcggagactgctacgactcgctgtgcaacctcatcttcgaggacgactcgcccaacacggcgcacacgatggtggccaaggacggcgagtccgtcaaactgcccaagatcttcgtcatggccggcgcagtcgagagctggctcaacgagttgacggaggccatgcgcttctgtctgcgtaaggagatgcacgactccatcgagactgcggccaactgggatgtggagaagcctcgccaccagtggctgttcgactacccggcgcaggttgtgttgaactcgacgcagatctactggacggaggagacggagatggcgctcgaggagttcgagaacggtcaggaagactcggtcaagagatacctgacggtgtgcaaccagcgactggagcagcttattaacctcgtgctgggcaacttgtccagcccggatcgttgcaagattatcgctctgatcacgctggatgtgcactcgcgagatgttgtgaagaagctcgtggacgagaaggtcgagggcccgctgagtttcatgtggcagcagcagctccgcttcatctggcgccaggagaactacgacgtggatatcagaattacggacttccggtccaaatactcgtacgagtggattggcaatactggccgtctcgtgatcactccgctaacggatcgatgttacatcaccttgaccatggcgctgagactgttcctgggtggagctcctgctggccccgccggtacgggcaaaacggagaccacgaaggatctggcccgagccatggcgctgtgttgctacgtgttcaactgctcggaccagatgaactaccagactatggccgatattttccgtggtctgtgccagactggtacctggggctgcttcgacgagttcaaccgcatcaacatcgaggtgctgagtgtggtggccacccaggtcaagtgcatccaggacgccatcgtgttcaacgccgtgccggccaaccgagaggccaagtaccagtcgctgcctgcaggaaccccgcccgtcgtcgtgggcgagtttgagttcatgggcgcgtcagaccgcatcacgctcatcccgacctgtggtttcttcatcaccatgaatcctggttacgccggacgcacagagctgcctgagaacctcaaggtgctcttccgctcgtgtgccatgatccgaccggacctgaagcccatctgcgagaacatgctcatgtccgaaggcttccagcaggcgcgcaccctggccatcaagttcgtgacgctgtacgagctcagcggcgagctgctgtccaagcagttccactacgactggggcctccgcgctgtcaagtctgtgcttcgtgtcgctggtatcctcaagcgagctgagcccgacgtcgaggaagataaggtgctcatgcgtgccctgcgtgacttcaacacgcccaagatcccgcaccacgacacgccgatcttcctccgtctcatcaacgatctgttcatcggcgtcgaggtggcccccaaggtcaacatcgagctgcgagagaaggccgtgacggtatgcaaggccaacaacctgcagcacgacgactcgttcatcctcaagatctgccagctgcaagagctcatcgatgtgcgtcactccgtcatgctgctgggccccgctggctgtgccaagaccacgacgtggcaggctctggccaagtgctggaaccttggcaaggagaagaagatctgcgtgtacgagacgcttaacccgaaggccgtcacgtcggacgagctgtacggctacatgacgctctccaaggactggaaggacggcgtgttgtcgatcatcatgcgcggcatggccaagaactactcggagcagggcttctacgagagtcagacgtacaagtgggtggtgctggacggcgatatcgacgccgtctggatcgagtcgatgaacacggtcatggacgacaacaaggtgctcactttggtgtcgaatgagcgtatcccgttgagcagtgccatgcgtatggtcttcgagatcaactcgctcaagaacgctacgccagcgacggtctctcgagccggaatcctcttcatcaacgaaatcgacatcggctggcggccgttcatggagtcgtgggtggccaaacgggaggaggaagtcgagcgcacgtatctgccgggcctctttgacaagtacgtggaccccatctacgacctcatgcgcaagggctacaagcaggtcgcgcccgtgcgtctgatcaaccaggtctcgaccatttgctacctgctcgagggcctgctgggcaacatccccatcgagaagaagaacccggaggtgattgagtcgatcttcgtcttctgcgcaacgtgggccttcggcgggccgctcatcgtggacaagagtattgactaccgcaagaacttccacgagctctggtgctccacgttcacgaacgtcaagtacccgaaggaggggctgtgcttcgactacttctacaacctcgagagcggtgagttcgagagctggagcacgaaagtgcccaaatacacgcccggtaccatcggcaatggcccggccgatacgccgttcaactcgatcgtcatcagcaccaacgactcggtgcgtatccgtttcctggtcgagaccctcgtggcccgccagcggccagcgatgctcgtcggcggtagcggcacgggtaagacgacgatcctcaagaacttcctgcgggacctggacgacgatatgctcttctccaacatcaacatgaactactacacggactcggccaaactgcagcagcagctcgagtcggtgatcgacaagcgctcgggccgcatgttcggcccgccggcgaccaagaagctcatctacttcatcgacgacctgaacctgccgtacatcgagacgtacggcacgcagaactcgctggccttgctgcggcagcacatggattacaagaccttcttcgaccgactggacctgggcttcaggaaggagatcgtggacgtgcagtacctgtcggccatgaaccccacggctggctcattcatcatcgatgagcggttgcagcgccactacgcgctgttcgcgtgcatgatgccaggccgcgaggatctcaagaccatctacaactcgattctaaagggccacatgcagaactcgggcttcgctccgacagtgatcgcagtgtgtgagaacatcgtcaacgtgtcgatcctgctgcacgaggagatggtcaaccgcttcctcccgagcgccaccaagttcgtgtacaactggaacatgcgcgagctgtccaacatcttccagggactcacgcgctccaagggcgagttcttcccgacggcctactcgttcgcgcggctgtgggtgcacgagtccacgcgcgtcttctgcgaccgtctcatcaacgacgaggacattctcaagttcggcgagcgcatccgtgaggtgaccaagaaggtgttgccagacttggaccaagtagcgttattcaatgaccagcccccgcctccgcccggctccgaggacagcgcgccggtgcctgtaaacatcttcacgacattcgccactccagtggccggggccgacagtgtctacatgccagtggcgtccatgaaggcgctcaacaaggtgctggtggagcagctggacgactacaactctaagtactccatgatgaacctcgagctgttcgacaacgctatggagcacgtgactcgcatctgccgcatcatcgggaaccctggaggtaatgcgatgcttatcggtgttggcggcagtggcaagcagtcgctgtctcgcctcgcctctcacatctgcggctttgacgtgcgccagctctcggtcacgtccaacttccgcattgaagacttgaaggagagtctggccgagatgttcaagatcgcgggcgtgcagggactcccgctggtcttcctcatcacggactcgcagatcgtcaacgagcgcttcctcgtgtacatcaacgacatgctctcgtccggctggatcccggacctgttccccaaggaggaccttgacggactgctgggggctctgcgtagtgaggccaaggcgaacggcatccccgacgccatggacgcgctcatggacttcctgctgctgcggatccgactcaacttccgcgtcgtcatgtgcttctcgcccgttggcgccgtcttccgtgtgcgcgctcgtcgcttcccgggtctcgtgaactgtacagtcatcgactggttccacccgtggccgcgcgacgccctggtgcgcgtggcgtcgagttttctcgagaagttcgaggacatcggggacatacagctccagcgcaacctggccaaccacatggccgacgtgcacatttccgtgaccgacatgagcaagaactacttcgagacccagcgccgctacaactacgtgacgcccaagagcttcctcgagctcatcagcttctacgagatcctgctcaagcagcggaaggaggacatccagcggcagatttctcgcctagacgacggactgtcgacgctgcgtaagacctcggccgatgtggccgaactgcaggtggatctcaagcacacgatggtcaaagtggccgagaagcaggcctcgaccgaccagcttctggagcaaatgggccgggagaaggcgggcgccgaggtgcagcaggagaacgccaacaaggagaagctcaaggccgaagcggccagtgcagccgccgcagagctcgcagctgaggccgagaaggagctgagtcaggccaagccggccatggatgccgccgctgccgctgtggattgtctgtccaagcctgctatcactgagctcaagagtctgcccaagccgcctgcaggagtggacaacgtgaccaaggcgtgcctcattctcgtggaaaaggagtacaagaaccacaaatgggaccgcgccaagaagatgatgaacaacgcgggtgcgtttctggacgcgttgaaggacttcagaggcgaggacatccccgaggcggatatcgctcgcatcgaacctttgatcgcggaccctgagttcaccgccgagaagatggcgtccaagagttcggccgctgccaacatttgctcgtgggtcgtcaacatctacacgttcaaccgcatctacgtgcgcgtgaagcccctgatggactcgctcgaggcctccaagaagaagaaagaggaggccgaggagcagcttgcgcgcgcaatgggccaagtggccgaggtgcagaagcgactggaagcgctcgagaacacgctgcgtcaggctacggaggagaagctcaaggtggaggagatgaaggagtcgtgcgagaaccgactgctgctggccggtaagctcgtgaatggcctggccagcgagaacgagcgttggggtatcgagatcgagcagctcaagaactcgggcgtcatggtggtcggcaactcactgttggccgctgccttcgtgtcgtacatcggcgccttcgaccaggccgtgcgcaaggagctgtggcagcagacctggttcccagacctcgtggccaagggcatccccatcatggagggcatcgacccgctgtccatgctgacgaccgagggcaagaacgccaaaatgatgagcgaggggctgcctgccgatcgcatctcgatcgagaacggcgccatcatcacgagctgtaaacgctggccgttggtgatcgacccacagttgcagggcatcaagtggctgcgtgagaaggagaaggaccgcggccttgtggtgctgcagctgagccagaaccagtggctgcgcaagacggagactgcgatcgtgaatggccacgtgcttatcattgagaacattggcgaggagatcgacgctacgttggacccggtgcttggccgagccgtgtacaagaaaggatcgaacctgttcttgaagctggcgggcgaggaagtgcagtacgacccgggcttcttcatgtatctccagacgaagctgtcgaacccgcattacaagcccgagattgcggcgcagtgtacgctcatcaacttcatcgcgacggagagcggcttggaggaccaactgctggagaaggtggtcaagaaggagcagccggagctcgaagcgcgcaagcaggagctggtgctggccttccagaagttcaagatcgacctggtggagctcgaggatcagctgctggagcgtctcgccaacgcccccgacgacatcctgagcgacgtgcctctgatcgagagtctggaggagaccaagaagaaggccaccgatatctccatctcggtcaagaagaaccaggagacggagatcgtcatcaacaacacgcgcgagctctatcggcccgtggcggccgagggtgctatgctctacttcctgctcacgacgctcagcgccatcgaccacatgtaccgctacagtctggactcgttcatcaccttcttctacaactcaatcgaccgcgcgccgcagagcgacaagcagagcgagcgcgtgctcaacctgcgtgaatcattgcggatcaccatctatacgtgggtctctcgcgggctgttcgaggcacacaagctcattttcctctcgcagctcacgttcaacctcatgcgtcgaggcatcctgggcgaagacgtgcgagtgcaggaagcttacatgcagttcctgctgcgagggcccaagaaggccgcggcgggtggaggcgaagaggaagcgaaccccattgactggttgccgcccgctcagtggagcgctattaacatgctggccctgctcgaggagttccagaagatgccgcaggacctaaaggaggcgtcctcgcgcttccgtgaatggtacaaccacgttacgcccgagtctgagaagctgccgctcgattgggctggcctggatcgtacgcccttcctcaagctgctggtagtgcgctgcctgcgtccggatcggatgacggtggccgtgaacgagttcgtgcgccaagtcctgccgaacggcagcaactactgcgactgcgactcggctctcaacgcgctgcaggtcatggacaactcgtacttggactcgacgcccacgacgcctctgtacttcatcctgtctcctggcgctgatgtggtggccggcgtggacaagctcagtgtcaagtacggcttcgagcgcggtgtgagctaccacaacgtgtccatgggtcaggggcaggacgtgtacgccatggaccgcctcgaggtggcgcaccgcaacggccactgggtcatcctcaacaacatccacctcatgccgcgctggctgctggcgctcgagaagaagctggacgagtttgcgctcgaaggctcgcacaagaacttccggttgttcctgacttcggacccgtccaactcgatccccatcggcgtgctcaaccgctgtatcaagctgacgaacgagcccccatcgggactcaaggccaacttgaagcgcgccttcgtgagcttcccgaaggaatacatcgaggaggccgagggcaaggtcaagtccattctcttcggcctgtgccacttccacgccgtgctcatggagcgcaagatgtacggtccgctgggtttcaacatgatgtatccgttctctctcggcgacctgcgcgactcggccatctgcctgcagaactacctcgagagctcggccggcggcaagatcccgtgggccgatctgcgttatatctttggcgagatcatgtacggcggccacattgtgaacgacttcgaccggctgctggccaatacgtacctggacttctacatgcgcgacgagctgttggacgagatggagatgttcccgttcgttggcgacgagaagggcccgtccttcatgtgcctcgcgccgtcctcctacgacaagtacctggagcacattgagacggagctcaagacggattccccgttggccttcggtctgcacccgaacgccgagatcgactttcgaacgactcagtcggagaacctgttccgcacgttgatggagctgcagccgcgtgacgccgccgcgggagacgcggccatgagtccgttggagctggccaagcagggcctggagatggtgctgtctcgcatcggagagaagaagttcgagtgcgacgagatcgcgcgcaacctcgaagagatggggccgtaccagaatgtgttcatccaggagtgcgaggccatgaacgggctgctggccgaagtcgtgcgctcgctgaacgagttgtcgctgggtttcgcgggcgagctcaccatgtcggacgccatggaggccgtgcaggagtcgctgttccttgaccgcgtgcccaagtcgtgggagaagttggccttcccgtcgctgcgtccgcttgggtcgtggctcacgaacctcgaggcgcgactgcagcagctggaggagtggacgcagaacccggcggacatcccgcgcgtcacgtggctctcgggcatgatcaacccgcagtcgttcctgaccgccatcatgcaggtcacggcccagaagaaccagtgggagctcgacaagctcgtgatccagacggacgtgctcaagcgccgcaacggtgaagtagacgcgccgtcgcgcgacggagcttacatccacggcctgttcctcatgggcgcgcgctgggacatccagaacaacacggtggatcgctcgcaccccaaggaaatgttctcgcccatgcccgtcatcaactgcaaggccgtggccgcggacaagctcgacgtcaagggatcgtacgtctgtccgtgctacaagacggagttccggggccccacctacgttttctcagcccagctcaagtccaagtcaccgcctgcgcgttgggtgctagcgggcgtcgctcttatcatggacatcgtgtagatatcgtaaccctgcacttacttcatagtactgatagtcgtgtcgtctagcttctcaatactacccacattcttcatattgacaccattgatgatatagtgcctgagctggaccaggcttaggtcgtaagggcagggtgaagcggtattgaatttccacgctgaagcgaatcggaaaagtgaatccgtggtcggccttgtggcgtcgtgcttgggaactcaactactcgggttagcaattagaagtagcgccatccatttaggactgacattgcgacgttgacgctgcggcgccttcaactacagcaagatggcgtacagagagtagcggcaataagaaagggttcaacgattaaagtactgaaggtatatacaataatcaagtcaaataaaatcttgcggagctttaaacgtatttacttaacgaaataaatgaaacacgttaggtacgttattatttggcccgattgacgatggacttcgacgctacaggctcgtcgtactcgtcttcctgaggcgcacgaccttcaaatacactggctgcgactcactacgacgccctgcttgtccatggccaccgcatattactgtagctacgtctcggcggtgtgcttgctgagcttgtgcaaacccaacatgtgcatactcaggaaactgggaggacggaccccatcgctcgtactatcatagggtgcgcacggcagcaaccacagcctgctactgtagttgcagcaccggcgtggagttgctttcgcagcatcgcgttttaggtcaagtgattactgtactacaaaacctttgacaactctatcggggtaatcaatgatacagtgcgaaaagaaggcaaacagcatttgcgagccaatcgacggagatacgagcggaatggcatggattggcgggtaggaaaccgccaatcgctctgtttccgcttaacgcaggctggattagcttacggaaaatgtacagcccatgttttcggattggagggggtgaaatgacccgcaaatctatcgtgatgcagagaccaaatcggcatcagtggcgtttgagaagcatgaacaacccgcaaacgtagccacgaagcaagccttaggtctacagttccctgcctagcgctgggccggccttctaaaggttttaaggacaggtagagccacatttagcactcgattacccagttcccagggatttgcaatagatttgggtgccatgacacccgtcctgaaaaccgaaacatggatgtccatgatttcagcatattttacatgtttggagatcttacttggttttagtatgcctttatacctaaccctatttcgaaacatgggctgtagggccagccattagcttacctaattcggctacggagggacgacccggaattaacatgggaattagctaactcgtggcataattaaggtcgataagggtttagagttatgccagaattatcacggcagaataagtgaaaggcacaatattgacaggcgcggccctaacggtgtacaatattaccgagaaactgataaattcgttttgtcctgcgcttgtcagatcaaagccatatttcggaacgggatacatcaatacctaaaaggagtaattgacgcgtttcagcgcggagacccctctgcttcatcagtatatacgtttatctgcaatatgccatacttagacgtagtcaattttgactgcaggctttcgtagcgcgaaaggtcgcgctgaaaaatacgtgtccaatagattacttcggtgatggcctcgcatccaaatctgtggggaagacgcctgcgcagcggggttccaagcaaaagccgtttagcaggaataccccagtgtctacaactttcgtcgatctctatacctgataaacatcatgaatttctcgcacattatcaaataacttgcatatgaaaaggcattacggtaatttatgtcgaagagtcgaacttcgtgtgctcttttctcgtgaactggagcactattgcagctctaaccatcaccgttgacctagtggcagtaagacctatccaatgatacctctttgtgtctgcactagtagtctctttctggtacctaaatatgcgtcttctcggagaaatccagttataggtattgtgctttgcatccagtttgctctcctatttagtgcactccttaagtacttagtgttcgtacttagcggtaaatcatagtcgccttgaatgcgagttgctcaagtcgtgtttcgagctcgatttggctcggaaatggcactttctaaaggtgccaaaaggatgccaatccctggatgtgctaaatcatgcaggagatggcgtttgtgcactacttagtgctcattgcccatccacgactttcagcaattcgcactcgagtacgatttatagataagtcgtgctcgataagtcgtacgacttacagtccgaaatgccaaaaagtatgcaaagcacaatacattcttagggccacaacaagcgtcacggcgagcagagctggctgctcagagaggattgtctgcatacgataaactatgagagtctagagccagaaagacaaggaatgattacaaggagttctgctgcagaacttctgccggcgtaccgtatggtgatctaaggattggaataagaggagcaaagcccaatccttactggaaagaggctcttatacagtgagtcgatttttagtgtcagtgactgtagcgctgttgtacgccagacatcccacactcaaggggggccagcaaaaacgctgaagtattggccatactgcacgattctgtgccgtaatggcaggcactactagtacgtacagccagcatgagtcttacccaagcaattctactcgagtcagtgtacatgtacagtatatgtatactgtacatgtcgagcgcgtcacgcggggaccggagcggtcgggctggtccgcgggctttgctctcttttgaggaatgaccccagttgccgcggcgcgcgaatttggatagcaccttccggagtgatggtcactccaaaagtgggcaggggcgtgtattcggggggggtccgcctgccaccgctcgcttgctttcgaaaatgactgaaattcgtttctgggaaagcaaggaaagaagaacggccgcgggcggacgggaaaaacctcggcgaccggccgccacactaggattcagtatgcgcacctgaaaaacctcgacatccaccatatcatctttggcagggcgcgaccgcaaaccctgccaaagccgatcgaaagcgggcgcattcttcgccgttttgggccgaaagatgccgcgagaccgctaaagatccgagacagcctggcttttaccgctgggggcggcggcgaatacattgtataataatctctgaatgaatcgccaacacacatgatcatgacggcgggcagcagctgggttgtacgcatgcgacacgaattgttgtcagcgacgtaggatcggaggagtcataaccgctggtgggtttctacatgtaaatgcgaatttagagtgagatgggaggtaatactagtagtacgccatactaataccatacttgtcctgaacgattagccagtttctcttccttctcataggatgtgctattaaattagggaggttgaatcgcttcccagatgatcacctcgcccaaagaaggagggtttagcctccgccttttcgccacaccaaagccatgatcattcttgaaaaaaccacccactccaacttgcgacttctacagtgtacgcgctattcaaagatgaaggtccagatcgtgattgctgccctcgccactctgctgttgcccgtgtaagtacacactgttaccggggcgtacattgtataccatgtttactgaccttttgttatcagccacggtgcttcgaacactgctcgcctccagtgtgctggaggagtccctgacaacacaggcgccggctctggcatcatttacgagaactctggcttcttgaccgctgacttcacccagaagtcctgcgccgcggcaggcggctcgatcgattctagcaagaagggcaacgacaagtgctgcatagtccccgcttctcccggtgcccaaatcaacactttttttggcgcttgcgaaggtcaaaagcctggaagcaactaccagacgttccgtccctttgcccggtattgctagatggatggaaacacgtgggggggaccccaaacagggggaatctggcgtgtggatatcctacgctatgagtatcgtgtagcagacaatgtgcaaatttatacacgctctccactaaaataataatcgaagtttccaaaacaaaatcgaggatctcgatgcactatttttttgccacaatcttttgccggtccagttcttttttttacttgaagtaaatctgttaggccatttaactagcccatggagagaagtacttcgtcggatagccctatgcgtgctctatattgtactacagtagtagctgtgacgaagagcgggggaggtgctataggtgggagaatacttttgccggagctagcctgtaagaacgtggtcccttatcgctggtaaactatcaggctagcatcactgcagggatgactaatgttattcgaaggttggtgctaacaggacggccgctttccatccaacttccatacaccctatcgatctttgttttaaagaccgcggctatagtagtcatgactacgattttacacccccgactgcttgcgcacccgaaactcaatcaaaagtcgattgtcattatcacaggatcacggtatgcggacaactatgccgctgactagcaaacagcaatagtggggctatgtgcaaacgtaatactatacctctggcggaaaacaatgggcacaccagtaatattctgtacaggagcttttattctactttgtagaagcaaagtttgaaattttgtaagcgccaactcacataccgccgactagtagtgatacgtcgtagcaaaactacttaatatttgtatgtctaatgaggaaggggtttgagaaaagagtgatgacgagggctgcagaagtgattcataacagctcacaacgtgcatgggtgtccgctgcggatattagagatcattagcactcacttagtactatatgaacacaatataccttacctgcaaaatgaaatgcagaaacgattcagttacctatccttcgtcgttgtacgggcaaacaaaaaaccaaagatgcaccgaaaccatgaactccgccagatttggatctatcttcaagttttagccaaataaagcaaatgcaacactaacatcctcttatctctaagatgtatccccgcttttttgcgaattgtggcggtgcgaattttatacgagagctttgattaggctgggatagctgggtgaggcaaattctggcagagcatttgtgtcttattcggcatttaaaaaaaaagaagttaagtagttggcgtgtcctcgacactcgtttcgaattagtacatccgtccatggctcgagcataaaatcaactggtgataatactaagtatataacaaggagacccgaatacgagtcgttgtacccaagtttatcaattttaattgatttaaaactagggctccgcgaaggctgggataggaggtttttgggataaactcctttattacttttttttacgatccaggaggggttttagatctcgttggtgtgaagcgtcagaggatgaaaatggcttttcccgattggacagagacaggcagttaggaaacgaccgctggctgcggccagcgcagtagctctcattcttcttcttcgtctcttcagctcaagactccagttacctggtgttcggctctctctcacggcggatgattgcatcgaacacgtactactaccttcggcccggcactctagacctgactggctactgctatgggatctcgcgtggcgttgcggatgagggggggggggagattacggtcgaaaggatgccaagcggccgctggagagacgcaggggtcactgaagctgtcgtccctctaagctccttggaggaccgcatggttacggaagcagaagcacaaggtggtgtcgggacttacatgaccagctatctatgtgtggcgagaggatgcgcctaagcgctgggactacggcgtcgtagtcgggcataggacacctcgactggcaccctgcaccttgtcttcggtgacggttcggagtctctgcctctcggcgaggctgcattcgaagctttgtcggtggagagctacgcggcggccgtgcctccgtcgccctgtttgtgatttgatgattggcgaggtgaaaatcgttcacgggaatgttgctgctgattttcacggcgagggtcgtcaacgtcgagcgaccagaaatctcgcaacaattttcggacgatataacgtgccgcaccctgatgaagctgaaaagattccgctttacgatccctcgggtggaaatgttgttcgtgtttcgatcaagtcggtcctgaactatgtttactatacctcgggtcgccgtcggcctccggctaacgttgtggttagtgcatcgctgtactcggactctgcttcggggccgactccacctgtcagaagcagggagcggcctagtcccagtctccaggatgagcgtcttcttgactctgaggacgacagtgactcctccgatggcagacccctccagcatacgacaagagtaaaacgttcccgggcccgcgacgatctcaatcctggcggttccagcatacgtcgacgtgtggaggagcccctggctcgcttggatgctcgctctacggttgaggatctcgacaatttgatggcaccggcagggggtcccaccaatgttctgtcacggatactatctggagatgaacatcgtggagacagcgccaagcagcagtttcgtccaacgtctgtggcgtggaatattcacaatcgttctgtctcgagtaagtattctgcattaacccctgatgtgtacttggaattgctgcaatgtgattgccaaagcctgcttttgttgccacacccggctgtattgcgacggtttttctctctcgactttggtcaacgtggattgtcgattcggcactttcgtcttttgagtacactagaagctcgggagcttcgtcatcgctacaacatgactgatttttcggcaaaaaatacgctacccgcgatgacgggcctcaagtcgctagatgagttggtggatgctctctcgtgtttgggaacgtggtatcgatcgcgtgttcacccgatgttggtcgtctagtggagcacgcgcgagcctttgtgagcactttgattcgcaaccgtgtggcatttgacaatgtagcggtggaagaacttgcttactgggttgatgagcgatttgaagtatttcggtcattgctcgctcaaggcgagaatgatgctgcgaatattgtcatccaatagttctcgtccacacacgagtcatatcaactgctccggcagaatgtagcggagagacgccacgaagaactaaccaagcggctaggtcgatttgaaggacatgtcggatccggatctagtagtcaatggcattcgaacaagcgtccgcgttcatctacgggagcagcgaaggctgatcgagtggtgactcgtcaaggcgtgcccctggcggtacttaagtgtgacgcggtgtcgatccctaaattcgggtgaatgcacctgaacctgggaagtcccaatgatgtggagcttggtgatactggatgatttggagtctcctataaaaacaagggtaatgtctgcgaatggacgctgaatcccggaagatagatcaatgtgggcgagttgctcccgttccatgaagtgcaacggaatgcgagcgatcctccccagaatatctaagtacggcggaactcgacactggcttacaacctgggagctgaggcacttgtcagattccccgttgttttcctggaataacgattcccagacttcgcgttcccagacaaacctcccacaaaattccaagaacgacctcggcttgaggcgttccgaggctccaaacccaagaacacttgatttcactatggcatcttccaagatcctaggtgtacccaacaactccgagaaggtatccagtttggcgacccttcaaggacagaccaacactccgcagaaagatcgcagtctccgaagggtcgcttaggaaagatttcgtctgcatgtgacctttaaccaaacagagttcgttttgcttcgaagggcacaagtgcttctttcacagcctggaaggccgttctccacgacaaaattctaagtactttaggtaagtgatccactgcttcggcctggaagtgatcatatctattccatatcagtatatttggcggattgcagaccgtctttgttgtatatttgcggtctattgggtctgtgtcgaactgaagaagttggcgacagggtagatcgtttcttctctcggagaggtggtgcgcgtccccaagattgatcaagtgtcttggatttggaccggttaacttgtgttttggccttagccttgggcctagagaaagaagagagggcaaataagtatttgtgtgattgtataacgtgtataactctattgggttggattgttctagcgttagcctggcgtagctgtctgattcacggggtcgatactaacctcctggtgaaaagaaccgctacccaagggatacacatcgtgcgcctgaccaacagcgtgtactgggcaacacacaccctgtgccagccgagacggatccaaagctctagtagcctgaggtctgtcaaggagagcctataattgttttctgggagaaaacaccgcatcgcctcgtcacacaaggcacttcctgtggaaaatgataaagctctctgcatgatgtacctccaaccagcaatgtcgcggcaacggcacccagtgtgcattcgagaagcgtggccacttcaggcccaatcaacttcctgatgtggttaaagagtacattatcaagaatttcggcggcttcaaaccagagtttcaggatctgtgatggggccagggcatccagagcggcgcttcggagccttggcaaaattagcgcctgtcggccgaccaggcctcgatgttggatttgagtgctcatggtagttctcctgaggccaaggcgagtgtacgccctcgtcgccaggctgtgttggcgcaggaacacgttcggatggcgcatcgccgattcgcagcgacgcactcggtccgacaacgacttctggagctgcatcaagtcaaggcacaagagcgacttcatgcagctttactgaattatggaatagagcctccgaatcccttccctagagtcgaagacgacgtggtgtctccacgctaccttattgatcgggaaaaacagcgtgcattcaatgcctacatccggcgttccggttgcacgctacctgaatttgtgcgtctacttcacaacgagtcagctgacgatcctagaccgaacaaagctcttgaaattccaagccaccatgcggcgtggagttcgtaccctcacggtaaattatggtaagagattgttcgtcatggagttcggcctcgttggaagtcacaggaatctcgcaaatcaacaccaccccagaaccatcagtccgcaattcaggctctcaacctgctcgcaaaaaatatcaggaaggggcaagatgcaaaccagtacctgggactggatatcgaccttcttgatatgctggacgacatcaggtgtagccctttcggggcggtggctaaaggctctttggacttgggcatcgacgctcgcgttatccatgacctctcattcccgccaggaacttcagtgaatgatgagactgtacccggggatactatcgacatcgtgtatgagggcgcatccatggttgcacaacggctggttagtctgcgatcaacccaccatgataccaaaatataccaaaatgatgactggagacgtgaactcagcttttcgccacattcccatccatgctgactcggttgggcgctttgcaggcaccgtacctgagctcggcatcctagttattgatttgtgctgcccgttcggttggacagactctccgggatactattgggtcggaggtgcagcgatatagcatctatacgagaacacagcaccgtcctgggatggtatggagccagaagagtgtgaaccatttagttgttcggcgtggtgtgatgattacatctgcgtcgaacctgacgtaggtactcggctggccgaagccaacatagcgttgcgggcttcgatggtcgacgtactgggctctttggcgtgcaatgacgacaagttctccctgtggtttatcaacggcaaagcactggggttcaattggtcactactcgatggaacgctgtccatgccctctgaaaaaataacgaaggcacgtactcgcgttctcgaagtgatcaacgggactcatacgacgaggcaccagctggatcaactgctaggcagtctgcgccatgtcaccacgtgtgttcggcctgcagcagcgtttttccagcgcgttgcgacgctacatcgctctgcgactcgctatggtcgggttaagatcaccgaggacgtgcgcgatgacttgagatggttcctcgtaattttgaaaatcgcaccgctgaacggcgtggcatttgaccggtttgtggatagagttgatcctgacttcactattcttatggacgcatgcgacgttgggttgtgcgctgcctttccggctcgaaaggagtatgttctggtccagtttgatgaagaagagctgggcgcaatatcggagctcaagcatcagacaaacgacttcgatatcaatgtgcgtgagttgctcagtgcagtattcgcagcagcggtttggggaaaacactggcgttccgagtgctcgtacccacatcatgtgcggtttgaaatcgacaaccagtctgccgtcacctggaacaacaaacgatcgagcaaaaatcccatcgcccaacttcttctacgatctctggcattgatggaagttcaatacaatttctactcgtcggctcgacatgttccgggcgtggagaatggctttgcagatgcgggcagcagggtgtggcaatcgcgggtacaccgagaacgtttttctaacctgtctgtttcttggacgcaggtgcacgtaccaaccgaattgaggaagccctcgaagctttgggggcattattgcgcgctggcgctctagccgagacgtcaacgaagagctacgcgtgaagctggaaacagtgggaagactggtgcgctttcacgacctactcaccgtggcttggccgggataccatcgacaagaacgcagcgcaacttggagcgtttgctgtgtttttgtggcggtacggtatgaatcatcggggccaagggaattagtattcgataatttgtaggaaattgcgcgctgtacgatggtatcatcgcaactatcaagactacgatccaggtgttaacgcgagccatgcaatacttcttcgcggaattcgtcgctttacggaccccgtctgcaaaaagcagccaattacggtgcctctgcttcacgcggctcgagcgctcctgaacctcactcagcgacggcatcaattgctttggggtggactgcttcttgcgtacttctttcttcttcgacgctccgaatatttgttcatcggcaagacgtgtcacgactacatcctacggctgggcgacattggcttttaggacgagcagggccagacaacaagtccccgccatgcccacatgatcagcatcaaactgactggcgcaaagaataacaaatacggccgtgaagaacttcggtaccttcatgcgtctggagatgctattatatgtccggtattaggcgctcggtgggtatacaaagctgcttcgagttacggtacgagctctggagatccggcactagcaacatcgcgtcacggcgggatcacttcaaggatgatggcggaggtcataaagcaagctgcaacacaagcgggcctcgacccaacacggtacgcgacccactccatcagaattggaggagccaccaagctttggaatgcgggtgccgaccacctggtcatcaaggtgctaggcaggtggctttcgaacgcttttgaagaatatccggtgctgtcggcagaaggcgcgcgtgatattgctcagttaacgtgctagttcgagtggcaaggctccatctctgtcacttccgagcgcgcagaacggttcaggggatacgtcaatgctcgtgcttcgatgttatgttcgccggtctaacaagggggcgaccactccgccgacagcaagtggcgatgctgggggacgcacgttaacattagtgctactgtgttgcccggcagcaatttgtacccgactcgagcattgcacagtcgcaggagcaccgtacagtcacaactcgagcttcggcacagttgtcgacgatgaacttcggctcgagcatcaactcagccgcgagtactagtcatggctacactcgagcctttggcacagttgctagcagtgagggatcgactcgagcatgtgcacagtcgacgcgtcacgaaacagcccaactcgagcctcggcacagttaagtttgaacccagcatggaatcgacattatggcatcagggcacggagcagcacttgattttggggcggcgccactccgcaccctaatctcatacaagctcgattgccccactgtcgtagtgttaattgttggaaacattcatctcctgtgcctgcttcccagccgcagcatctgcccggtcattcacctcaacggcgaagatgcaagatacgactaggcagtaattatacacagtaatgaaacgaaccttgctcgagatctagctcgtggagaaatgaaaatgcttgcatttgtatgctactacagtcctgtagtagtccgttcgattcaatcatttactttacatcactccatccgattcggtatatgctactgacccataccagttcaaactgcccacgcatattaaccttttggaggccagtgcggcaccggggtcataccggtttctggaaatgtaccagttcggtgtcaagagaggtcatattttgacttgacgtaccacggatataatcctatttggtctgcgatagcagcactaacgttgcttcctatcccagtaaaaagagtacttgcatgtacaacctttttgccgtgtctataatggtgatcgatgatatggagccgatgtagccagacaacgagtacgaatccaaacaaaactccgtaatcaatcgatctttccactgcaatgcgtcaaaacgtttgatcatttaacttgtcctagcgattttgcagcgcaaattttgatctagcacagaattcgagtcaagaaacacgattagttaattcaaactacgggcatctcctgcgcctgcttcgcacccgcagcatctgcccagtaacgcgtctatatgatatccaccgggggcagcctaaacagcagcactaaagctatcaatcaagcatggggccgaagcagcacgacgcagggctcgctgccacgcgcgctacacacaccaactcacatagcacatttaaacaggtacatgaaacgaacggggtcccgcataaaataccgaccacttcgggaattttttttttcgcggcagggaccctttccctcttcgcgtctttcgtgtaggtcaaaatgaactacttaagtactatctccgcccaaatacttcttgattgcagctacagtagctgagcttctacacgaacaccattatcaatgcccacatacaagatctctgtggacggatcctactcaaatggggggggcaccgacgtgagagatatagcgtctattctacgccgtatagtgagttggcctctatgagcacctctcaaccatgtagcaatcaacaatcagtaggtacagcaattagttaagacttaaatatcccccataagtaaagttccatactgaagtgcggcgaatggtgagagcgccggggtccgacggggtcccgccatccgtttcacatgtacgacaattacaagttgtgcttttgcaagattcggagattgatggatcccatagcatcaacgcagatattcagttaattttagttcgcaggcttcagttaccggcttcagtttaccggagccagtcaccgggcggacgccgaactaagctgtgttgggctggccacagcactcctccggggttactgctatcccagaataaaaaaaaattatactgggataggaagcaacgtgagtgctgctatcgcagaccaaataggattatatccgtggtacgtcaagtcaaaatatgacctcccttgacacccaactggtatggaggctggtccagttcatttgcaaattcgtcgagttaagattcgtttcattgattttgctctacgtcgtgaccatagttgtgatgatacattgtcggacagattcggcggctgcgaagcaggcgcaggagatgcccgtggagcgtgcggattgagtttatcaatgggctattgacaatggcggtcaaaggtaagttaactagtcctatcccagccttcgcgaagccctagttgacacgatgatcacttcaaatccggctggtttcatctcatttaatcttttatttaaacccagaaatgatccagacgacccccaacggtggctgttagtcgcgagaatctgatggtagattcgccaggatgataaatagtaagacctacataggagtatactctggggttttaactttatcagaaaatctgatgaagttaaaaacgaagtttgctattacaatgttgtgcttctggcccgaagaagttaaaaaaatctaggttttctaaatacgtagcctttttcatactacgtgtagaagggcagatcgcatgctatgttacatatacacactatggtcaatcgtcagcaatgccgcttgtggtcgcttcgcaccagttttgatcttctcctcagttcgaacttgtattgcaatggcattctgtttccttgcccactccgattcacggggtgctaataaattccaagtaaaatttgataatttcattgcaagtggctaggaaaaatgcagagtccggtatttacatacatgcacggacgtgagcaagctaacacagaatttaagagtgcaccgggaaaaaaatagttttgcccaaaagtgcttgtagcatgaatgtcatcgcaacaagcagcgccttcagagtggagtcagtagttgcaagtggatgcagcgcgaatgaacttcatgtcctcgaaagtctgagcatattaatcgttactcggaaatcagaaaaaaatactggaattagggacggcccagacacacggcgcagcgctgcactcaggtacttcggccacacccacttgggtcagctcctagtattaacagctttgtttgcttttcagtgtttcttcactcgatacagtgtacatgatcttgccggtatgtcggtctcaatgtccaagttgagcttggtctgcagcttcgcataggacatcacgtaggacggcagaatctcggtcatcaaattcctagtgataccagcgtataatatgttgccgtgaaagtaccattggcgatactacccctttgcctggctgtagctggccaaatccgttagagaattcgaaagtgattcaattacggtagagagctgagagtgaggatcaaccataaacgtcaacccttgatcgctatcagtcagatagccaacccttcagctcgagtccaagctggtcactctaacaaaatccgcaagcaagcttgtcatgatattggtggtacctgaaattaacattacattttattcaacaagtcaactagaagctccaaactggacgctagtatctctgaaaaacaagacaagaattggttacgttgctttgccaagtcattctgttttcggatattgcactgtgcatccgtttgtcatgcggttttaatgcagtgtttcgtgctcgtagatgcgagtttcttaaatcgtatttcgacgctcagaaatgacactttttaaaagcgctggcatgtgacgatggtaatacctattgcatcacgaggagcctcgagacgaccgctgcttgcaaataggacacaaatggtgtctggatgaggaaaggtagaaagtcgcgagcatgtccaacccatttttcggaagagtccaagcacagcagtgccgttatagaagaactcggcgattgcggagactttatgtcaaaacctggcctgagttaggaagtcgaaacgttgaccaacgacacacagtttctcgagagcgtgtgaacactcctcaggtgaagaagatcctctcgaagaattcttgcgcacttaccgagcaggtcaccagaagcatcgaggcggaggtagcgaaaacttctaaaaaacggtaaactcgatgtattgggggggtacagctgtgatactcattgtcagtgcggcatcggtagaattgcatggaatacctatacagacgcacatggcaactgatttaaggcacgttgctgattcatagcattgttgatttacaggatcaacgttttgttgtgtgctctttcatgatcgctctgatattgtttttactcgctcctccattgccatcaagcgagccgccgcctgcacgtgggtggtcacgcgggattttagccaggagcttatcatcgatatcccaaactgcccaaatccactactatcacagccgccgtcgacgcccaagacgatggtgtctgaagaacattcgaaacgtacaatgcgttgcagacatccacaacgaaaatgacgactgtggcttctggtcgtcgtcatccacaagcgcacgattgatccagttcttcgcgagaatttgaattatcggcaatacagcgacggaaatcacttggttccagcgggtaagagacacgaagctgaggatgtacagcgggtagacgaaggggagcattggtactcttcgaggtcctcgacaaacaaggacgggtccgcccgccaccgaggaccggaaatgtacgagaagcatacgccaatgaccaacacaaacggaggtccggcgataagcagaccgaacggaagagggaaggcgatcaggtagaggcccaagatggcaaggatgagaactcgccgtcaatagcaagacgacagcaatttgccggttcgataacttgaatttgggagcgccatgacccatctgcactagcgctgacacacccatgaagcacatggcggcccatgatcggacgaaaaatacgtcgttctcgtaaactccggcttcgggtggagccaaaggtggaacttcttagatcagactgagggcgagacatggtgggggtctcagcaggcaaacgagtagcactctaggcgtactcagttcattcatgtagtttccgagctgctgaagtcgctggtccgagtagcgtccttgatactccgcctgaatcgatatccatgccttcagcatacgtcgtcgagcacttgttactcgtcccgccatgttggccgatgtccttctgtgatgaaaagccaattatagtggagcgaccaacttcaaaatttgatgccatctggaaattatactagaatccacgtcgggtttattagtcgagtctacatgtatggcacgatacacgaacgactagaggtgaatgcacctcagtaagggacgtgtttaactagaggcgatgctttggtctgtgaggacagtgtagatttccgttgagagggcatataaaaatacaaaagtgtgacgtagtctagagtagaacatacaacatgaaaatggaccagctgtgaaagcctaatgcagcatctccgtagcattaaaaaatggaagttgccgtgctaaaagcgaagtcatgactttttccattggtcatgatatcggcgtgcgaggcttctggaaaattgcgacgctttcttttagttgtgaaagtttgcgtaatagagtacaagtaacggacagtccgcacagctactcagctcgtcttgttgtgattaccgttcgactttgctgcggttcgtcacgctgtgattagaaatactaagcatcttacagagcaagtggaaccgacctctcccgaccaaaacaagttttagtgaggccgatacgttgctccaacatagtgatagcaaggtgttcgtactgtatttgagcttctgatacgattgtgggctgagcatggggttgttcatgctgatagaagaggttgccacaacttgtaacttgtgtgacacaagtcgttcgagacaagcttgcccttaccggtatctgccctgccggttatacatgcatgttatctcgaggcacacttccgcgatctgctgcgcgatctgcttctacagatgtcggcacttacagtactcttcggtagaactcccattttccgattttccagaaccgacgcagatgaagttctgcactctcttcgtcttggctgtcattgacatcgtctccgcggcgcacgcggcttctattgcccacgataaagtcgagccgcttgcccagcccgagcctgtcacggtctcggaaaagactggcgtcatgttcaagccgcagatcgagtataagctcggatgcacctcattccccgctgtgaacaccgccggcgaaaccagcaagggactaccagccgatggtcttgagctttgtgataaggctcatttgggttcgcaggtctacggtcgggctacctggttcaacggcgtttgtacgcgtggtactgcccgaaatctatcatttctacacctttgtgtggactacttcgtgatcaaatccgaaagtcgcaaaattcatattgcaaatttctattaatagatattctattaatatataatagttagcaacttcaattacatggaattacggcaatcaaagttggaccagaggctactactactggtccgacgagccctgttacatgccgtacaccatgccctcgttgttcgccgccttggtgacgaagtcgtgacagtgcagctccatgctgaccaccagcgctggggtcatcacgttcatgttagcggtcgcggcgcgctccaggatgtggaaatggagaggatctcaccgttgctgtctggctcacgcgagcgatcgtagattgcgtggcgatccagagccaagtctcgcttaatgcgggattttaggacgctgcttctcgaggacggtgtggcgactaacgcggccttggagggacatctgcgaagaagaaggcgaattgcgaagtgatctcccctcggtcggcgtcggctatagtgcgcgcaaaaccgcgcgcccttgcttttggcgcgagcacagcacgccagcttacgtagccatggagatcttggacctctggtcctaacagctttacgctgccacaggtgtagttgcagaggtcgtgaactcgcacagcaaacacgtcaacgcagtgctcgccccacgtagcagatttgggattgcgggagctcaggctcctttagcagaaaacgcgttgtacaaaactcaactaagtatcgagtggagtgggtgactacagtcaccatacaaactactagtttctgaggctctgtgcagcacaggactcatactcccccgaaacttgtagtctgcatcttcagtcttcttgatcctcgtcagcttcatcagtgcacaggcactcaacacccaattgctttcggtgtttgcgaaacttgttcttccccagcgccttggttagagcatccgctggcatgtccgctgtcggcaaatgcttgacctgcatgtaaccagcatccacatagtcaatgaccttgtaaatcgccaagtccaagcacttgatcttgtggtggctgcttgagtgtgtcatcaattgtaccgcagacatgttatctgtccacaacgttgccggagactgcacaggcacctccaactcgactagcaggttctgtagtcatcgaattcggtcggcacatgagcttgcagcagtcagctctgcactacaggtgtcagtgagagcagtatattgatgcttactctggtaagcaatgacacaaccaccaagtttcaccacttgacccgaaattgagcgacgagtatcaggatcatttccgaggtcagcatctgcgtaaccaacaatcgaaagttcacctttggcatttttcatcggcaaaaccaacccgtacgaagcagttcctttcagatacgccaacacacgctgcgccagtgcgtaatgttcttctgtgtagcagctcatgaacttactcaggatagaaactgcgtttgcaatatcaggtcgcgtacagcgcaccaagtattgcagcgaacccacaatttgacggtaaggcaaatcagaccgattcatctcaggtccatacggcgctttgggcttggctggtctaacattcatatccatcggagtacgtgccacacgagcatcactggcaccaaacttattgacgaggtgacgaatgtatgactcctgcgaaagagtcactcgatccgcctcaactttcacatccatagctagcagcaggttcacctcccccaaatctttcagctggaactccttcttgagctcctcgatgagccactcaatgtgctcgggcttcgctgcaatgaccacatcatcgacgtagactgtgagaaagattggagtttcgccaatccacttcacgtagacaccatctgcaataacactagccttgaagccaagtttcaccaggtttcttcagagttgcgttccagatgaggggagcctgctttaaaccatacagactcttcttcagcaagcacacacggccactcccatcgtcaaacagctctggctattccatgtacacatcgacatccatacagccattgagaaatgctgtagtgaagtcgatttggcggagatccagatcgtagtagaatgtcaatacgatcaccgcacgaatcgcttccatactgactaccggcgaataaatctcccaatagtctgacccaaatacttgctcaaaaccgcgaagtgtgagcctcgctttataccgctcaatctctctgtgctgatttctcttgatcacgaagacccatcgactggtcataaccttggtatttggtggacgatccaccaatatccacgtttcgttcgcttgaatgagaccgaactcaacttccagcgctctcaaccatttatctcgatcaggaccagagattgctgcacgaaccgacttaggcagcttgtccatggtcgaaataaaatagtttgccagcgaatagccatgaagccgtgtattcttccgacggagacgtgtcgatcgccggagaggctcactcggtggcttcttcgaacgacgaggctggttccattcgaccaggccaggcttgcgcttgtacttggccaagccaggcttgcgcttcttgcgactatcatctgactgcaaatcactatccacatcctgctgctgatcaccatactcggccatatcatcactgtcaggtaagttatcgtcagaattctcagcatcatcactcagggccagctcccccgtacatttgcgcttcttggactttgaggcggcttccaccacctcagtctcccccgtaccgctaagtctcgctctcttcttgccaaccactccgtctttctcctcccgatcgtccatgctctcgatatcatcggagtcatgggatgccgcgacaacctcgtcgtcacggctgggactcgagtagtcgtgcagaggcagctttacatgcggaattggagcgggtagcaccacacctgactgattagcgtagaccttctcaataactgacttacatagtcacctgaaacagtccacatctcgcgaaacttcacgtcgcgcgattccacaatacgacccgagacaagatccagcaagcgataacccgtcgtctcttctggataaccaaggaaaagtgcctcgcgtgctgttgggtcgtgcttgcctttccgcctcttcttaggtacaaaatacgtagcagcacacacccccacacgcaatccagacacatcaggcttccgaccttcgtagagctcgtacggcttacgaccctgattcgctttcgtagacgagaaattgtaaacagtcactgcaatttcagtccttctccccacaaacttgtcggcaatcctgttgtcactaacatcgtgcgaacagcgcgcagcatcacactgttcatcttctcgaccagactattctcttcaggagtgtacgtatttgtgcatactggacgaatctcgttctcccgcataaacttcttcagctcttcgttcttgaactcagatccttgatcagaaccgataaatcggacgcgccgtccgcgctgatgtagctgcagaatcagtgtcttcaagttaccagcactctgagatttgtgctgcaacaggaagcccacacatagcgagagtattcgtcttctacaagttggaatttcgtatttccacctgcagatctctccccatagccgcatacatcagacatcagcttttcgcagcagcagattgagcgtcgtggccgcagctttttgtaggacattctgcgcgacgttgccaacgtgcaactcaagcagtcgacaacttcaccactctgctcactgggtgggatctgcattccggtcacatgttcatcacgatagacctcttgcaacgcgtcagcatttacatgtgcgaaccgaaggtgccactgaaacagcgaattatcagcagccctagcagacgcaatgacgcgagcaggtgcatggatacttcgagtacgataatacccatgacttttctcgaacaaaattgctgttgaacctttccacatcagacgctgaggggggccattctcaggatacctggactcgcaacgccagccttcctcctccaaagcatttacactcagcaaattcacgtgacagccggggacattgcgaacccctgttagggtgtaccgtagctcaccgccaccgctcccatgggaatcctctggggatacaaaggatatctccaactctgataccaaatgctccctagtgatttcaccggtccaggactcatgtggtgtgttggtctccacatagtgcggaaaacgcaacataagctcgcggtcagcacacgtgtgcgtaattgcagctgaatctagtatccactccaaagaatcagacccgttcggcgatacagcagcagtagaccctgtgcttgttacagcacacgtattctccactcgtccaatcattcccaggggtgatggctgtggaggacctcctttcgccaagagcacgacgagtatcatgaatctcctgcagccaggagtccattgtctgctcgcgggaataggtagcatggaaaaactccttcataacccagacataattagaaaactcacgttttgtgtgatgagcttccaaatcttcccacatctctctgccacttggaagatcacacattctctctgcatcctccacttttgcgcgacggagcaaggtgtcctttacaaagaaatccaactggtcatactgctgttgagcagggccagctagaagaggacgaacgatgctgccatccacgagaccccacgcattgaatcggtgcaaatagaccttgacttgggcacgatacaggttaaaactgccctccatcttcggaggcgttttgttcacgtcggtcgacgagcgcggtagcaccacaggttgttgcacagcgtttcgagcgggaacgtaggtgttcacaacaggaacttggggagtcccaggtacattcggaggaggaactacacctccaaactgaggcacttgcggtccaacgggaaacgctcctgtcggagccactgttacagcaggcgacggcggctgcagaacggggaataatattctactttatcctgttcatgttaaaacaacttcaaagtacattgttaccaatattagttcagatcatcctaatgctacatgaatgcggcacgttcagtttaatacttgataaatggcaataacacacttggacgaatcgaagctgggagtttttgttgttgttagatattcaggcgatccggacgaagtctgtgtgcggctgcgccatgttttatcaaacagagtttgaatactcctacttttctgtacgccccggattcctgtaagagaggaagcccgggcggacatcgtcaacgcgaaggacaaacacccggtgtatccaactcctacacgcgatcgagatctgctagacctcagccttaacttatcaaacttgaagcaaattgctgtcttcatgacatctgcgaatctgccaccctacgaagggctaacgccagctccaactcgacgagtctggacagcggaggcagctcgtcgaacggaagtgttagtttttactagccgagatgtttttagctagaacacttccttttacgaaagtttatcgtacgaataataataacagcaactccggttgaagtgtactcataattgctgtcgacttccgagggagagtatggggtagagcttgattcattggctagaaggttacgcgaaacgctagttgactgtcatttagcaaaagccagtgtcaccctgatggccccaatgctggtgaaggtttttgcagtgtttttgctgatgttcctctgcgtccagggcatgacgttgactctgttcggcaagcccagcgatactctgcgtacgatcaacatcgacgcggtgacgcagaggtgctacaatatctgcaactgcttcaaagggcccaacatatcggcgacgtggcaggggtcaagcgcaacaccaacgtcgtcttctacaacaatccgagctgccagacgcgccatgcagtgggatccgggactcctgacggcgcgctctacttctccgatgccaagttcgacaaaacagtgaagaacttcatgatctgggaaaccggaacttatgccacgaacggggtcttggacgcgtgctatctcgacgagagcgcaacggtcaactcgacagccgaatcattcgctgtatgatgcagcaaaagccactctcacggacaacagttcaccttcaactatcggacactgaattccgtttcatgttccccattcataaaaaaactattttttttgaaagaataacaccaatacctggaacacctcatctcgtatacttagtatccagttctgcgccttcgaatacagataagagcgtgttcagtgaacgaccagtaaccgatgtacctgcagcaacctatccagtataacatatcacaagagtactatgcaattatggtttgtttactgtcgtttatggtatcttcatgggccaccataacgatttcatgcatattttcggattgttcatgtgtttatacacgggttaccctgcaaattcggttgggcagttagcctggaagcgctaaatatttgaatgcacgtattttttctggttttttcgccgcctgtaagtttccgagcacaccatgcaatctaagaaatataggattctgcctggcatcagcgcacgttttaaaggcaggaagggataaaattacgttgattagctagttgttgataaccgttctactaactacaaaagaactaaagttaaaactaaatccgtggagtcctaatccaacgagcaggagaaggtagaatcaccacgttgggtttttcaaacccaagagttgaagtaccaattcgtcgagagaactggcaatgcctttgaaaagaagcaatcaaacttggtacacttggttgtacagtagtagatgcagatgctgcggctgcgaagcaggcgcaggagatgcccgagtacatcgtttccctgtaagtgcatccgtacaagctagcttcgaactgcgagaccccccgggtccaccacccgggtccccataattttgcgactttcttggtacgaagtaggctgcacaaaggtgtagtgtcggggttgaaactcacgactggcaaaatgccgtggtgtggatcaacaaccccgccctggcttctcccaaggttacgggattgtcgacgtccaagaggtccgagaccgactacatgaagcccgttacgatggagacgtttacgtcggaggagtcctacgacaaacttaccaccgggctggaaaagttcttcaatggcaccagccccaagctcacgagcacacgaattttgggcccggtgtttttaaggccggcaactgacccgggagtgtttcaagatctcgtcatgtgggaccgactgcctgccccagcgcagacggcgctcaacggaccagacatcgggcgagtctcgttcaacgacgacagatttcagaagaagctcaaggaggcgtggccgttctgaagttagtgctgcggcgaaagaggaccacaaaggaggatatcgagttagttctcacgaaaaatggttacttaccggtatccgatatcattcatctgttcagttttgcttcatttctgtatcaagcaagaatgagcttgctcgcgctgctcctcatgagccaagccaactgaaacacggcagagtacaagcattctatcgtcgaaatccacggcaacttctactgctgctgacgggcacgtagcgtgtgtttcctccacaacccaagagtgcccttcgccgacggcgtcagctttagctcgtctctgcgagacaaacaacaccaacagcatcaccattacaatcagcctccaactcaccaccaactaccagcaagttcaacctacagcgttgtggacccctctacgagcaaactctccgatggcaggagttcgagcttcaccgactcgaacttgtcggccggtccagcacgatacaactccttcagctgctccgccgagcactccgtcttgatgtggaaggctgccgagccacgcgacatacacagcacatgagtcagtctctccagatcaccacatgcagcgagtccgcaaggacttgaaacctacagaagctgggcgtgcatgcgtccgtctgcagcacgacgcccaggagcgttggcggctgctgcagcagcggggccacgttcacctcctcgtggacctcagtcacgatggagcggaagaattcgtctctggccgcgacctccagacgtctcctctcgtcttcattgccttcgtcctccatcgtccgcagcacgtcctccgtcagctggatgtgtgacggctccgggtggcccccgggtgtgtccagcaggtcttggtagagccccacgctcttgctgcgcttgatgagcgccacgtgggcgtccgccgtctccagcaccgccgccacgcccactttgcgcgacaggaaggcgaaggcgtcgccctcttgcagctggcatccgtcctgcagcagccgcggcgcgagctccgagcagcacgtgcccaggtacgacgcgtagtcggtcagtccccagtccagttgcagcgaagagtgacggtcactcagcccctgcaggcggaacttggacgcgttgaagagtctgggagactggcgtcgtagctctgcccacgtctgcgccgcctgctgctccacggtcgggtctgggtgcgaccgccggttgaagcggtgtgagagacgcacgcgcacctgctccgccgccagcggagactcgaagctctgcacggagaagctcatgaggcgccgcaggggcagcagcatcggcggactgcggaagagtgatggtctgtagattacaggaagaaatgcggttactatgtttgtacacaaatatcaataatgcgcaggttgccaaatgctactcgaaagtcgtactcgagatggaaaaagctactggatctcagaggtgtagtgcgcacttttacccgtactcgatggcgatcaacccttggccgcattcttcttcaatctagagaccaaagagagcaagagaagcgatgcagagcctgttccacggcgtgcgcgagtacctgacgccggtgctgaccgagtcatcgttcgaggacaaggggctgctcactcccgaggagttcgtcaaggccggggacctgctcgtgtacaaatgccccacgtggcgctgggagagcggcgagccgagtctgcgccgctcgtacctcccagcggacaagcagttcctcgtcacgcgcaacgtgccgtgccgccgccgcgtgacgtcgctggatcagagctaccagaccgaagaggccgtcgagggcgaggacgagtgggtcgccgcctcctcgtacgccaacaacgaaggcggcgccggcgccgacgccgtcacggacctgagcgacgagatgggcgacatctcgctctcagacaagcccaagaagcagcagagccaggcaggaggaatcctgggcgccatcgtggacgagcacttcgtggacggcggggctgcaccctctgcttctggtgctgctgcggagccggagctgagggacttgagctcgtacgaggaggaggacaacctcgtggaggatgacgaggccgcgctcggccccgcagcaggcagctacctcgtggctagtgagcctgacgacgcggacgacgccatcctgcgcacccgcacgtacgacctgtccatcacgtacgacaagtactaccagacgccgcgcgtgtggctctttggctacgacgagcgcaacgcgccgctgagcggcgaccagatgttcgaggacattatgcaggactacgccaaccgcaccgtgaccatggagccgcacccgcaccgcagctcgctcgtgcacgcgtccatccacccgtgccagcacggcgcagtcatgaagcgcatcattgccaacctgaaagcgcgcaagccaggcgacaaggagacggaggagcagctggccaacgagatccgcagcgaccagtacctcttcctcttcctcaagttcattcaatcagtcattcctactatcgactatgactacacgatcgaagtgaacgccaagcagtgaaggaagcttcgttaaaagttggttcgttatccgaacaaaaaatcatattcagcggcaatgaggctgacctactaaatagagcagcttgattgaacgctactattacatgtatgtatgcactgacgtcagcgttttgcggatagctaccgaggttctcccggtattgtaggctgttgtctacgaaaagaaaataatcgatcggatatgacctgctgatcgacaccattacagagcgcaatcaactctatctccaccgagccatcgcatttaccacgaccgtaggttactttacctgtcgaagcaagttttaggtgtcgccagtagaccgtcggaacagcacgacagagcaactcgagtcgcagtccatgcccacgcgacagtgaaaaacgattcctggcgaaataaagcaagtcaagttgcatgatagaagcaacacaacgtttgcctaaccagttatcagcatttcgctataaaattgtgaaagtggttgtaaacgagagcagattaacgatctaacttgcgtcaggtttacgaggattggtatttgaatttgaagctctcgactcagctctttgagcgtaaaccttttttagcacgtctacatccgaatattacatacattatacatgtagtagggtcgccaaaaaagctgagcgggcatctgaactaaacaaaagtacggcgccataattcccctcaccaagaatggtttccgtttcactggcagaacttatattttgacagatcgagcgcccgtcgcggcgttacactctgtcctccgtagaacgattttttggataccgtcgcttcaagctgaacgatttctcattgtgaggaggaagagagaagagaactggacggacgggcagcgccgcggcggcatctctagaccaccgccaagtccaagccgaagccctacgctgccatggtgttcgtgacgctcaaatacatcatcatcggggactcggaggtgggcaagtcgtcgctgctgctgcagttcacggagcagcacttccagcccatccacgacctgaccatcggcgtcgagttcggggccaagctgctcgaggtggacgggcgcaaggtgaagctcgagatctgggacacggccggccaggagaccttcctctccatcacgcgcagctactaccggggcgcggacggcgcgctgctcgtgtacgacgtgagccgccgcgagagcttcgagcacctgggccgctggctgcaggagtgccaccagaactgccacaacgacgaggtcgagatcatggtcgtgggcatgaagtgcgacgtggacgagcgccagcgggaggtctcggaggacgagggccgcaactgggctgccgcccacggactctacttcatcgaggcctcggccaagacggcgctcaacgtcgagcaggccttcgcgctcacggccacgaccatcctgcgcaactttgactactccaaccaccaagtgcgcaaggcctcgggcgccagtcgcgtgtccatagaggccccggccgagcacaaacagaccaagtccgagtgctgcggcagcggctgagagagatatggcgtcgctaggaacacaaggagcctcgttgagtgaggccaggtaggtatctcgtcactcgtcacccgtgaggagagagagcaaagcaaagcgttgtgtgttatgtatctctatcactatgagctgacgccgagccgagcggctgacgcaacaagaacgaggaggtggagctatgaagtctgtcggtttgtgtgtgttgtgttaccgtctgcggtcgagagactagagcacttccgtccgctcggtcgctgctgcgttgtccaggagctcctgcacccactcgcccacgaggttgttgcccgtggccaagtagtgcgcgtagtgcgtgtgcaggcacttgacgttcgtgtactcgcggatgccggcgatgcccacgtcgcgcaggaagaactcccaccggcggcccttgaccagctccaggtcatgcgccgtcatcatgcgccaacgctgctccgcgtactcgcggtggctctccttcatccgctataatagtcacaacagaggtcagtcactgggccagaggtgaggagacatcgactgacgcatgcatgcacgcacctgcttggccgcttcgtcggcgtccagtcgatgctgcagcgtcagcacgaactgctggtcctcgagcgcggacacgcgcgccttgagctccgtggaggccagccagtagatggtcgggaagggctccaccttggcgcgctgtttcttcttgtacgcgtcctcggcgctgcgcagcgggtagagcagcagcgtggctggccgctggtccgccgacccgcgcacgcgcgacgtgcggccactgccgtcacccgccacgaaggcggccaccttgaccaggttgttgggcacgtagcccagctcctcacgcacctgcgccacgtccgcggcaggcgcctcgcagggcacgccctcgtgcacgacttccttagtctcagccatgttgccttttgaccttgaccggtactggtgacgctgagcccatacaaataccaagtgtgtcatgcatccgccaatcaaaacgccatcgaacttaatctacataccacgaacttaacgcgaaggcgcgaaaagacgcgatccttgatatgcctacacttggtcatcaaaaacacttgccaacttgtgtggccagcctcgctgcaggagaaggcagagcgagaaggcagagcgagaagccgagctcgagaagctgcgcagccacgagttcgagagcaacaaccctgagttgtgctaccaattcagcactagcgctcacaagaggagaaagggctcaccgctgagcgtgcgttggcgatagtcagatggtaaacagagcgattggcctccacgctgtgacaggggcgatccacagcttcgtgcaccagcttcagaacgtgaactgcggcacgcgcgatattcatgggtgtggccccgcagggaccacgcccttgaatcacgcgggccgcagatcgcccctgtcacagcaagtggtatcagtacgagcaccagcattttacaccacaggtgttcccagctaagtcgaagacctagcgatgtgcatttcctgcttcagtctgtcttgctgcaagttgccgttctggctggtgtagcacgaaggttgcgccaggttacgcttacgcttacggtcacgtaatttatccgttcggagcagtccaccccctcattcttcgggtgttcccagtactagagcctcgtatcgtatgcaatccttccttcgtagtaacttatctagcacgtgaatcgatttcctcttgaatgttcgacgaacattgttcgtagatattatatgcgggtggttgaatcggttgattgggatccactttctatcgaatacgaggtttggttaatttccattgagaacatctgtagccctcggatatatcaattcgcagttcgaagaactgtcgtgtggggaaagttttcggatgtcatcgaatgacattcacgcttccccccccccagcggatgacatcatccaacattcacagaacatcatacagcactcgaccgaatccggtctgacacttacaggttttgatagatgccgactactacgacgaacaacgaattgtatattagcaagaattgtattgtttcgaccaataagagatattggtgcgaatgatgctgaccttgggcacaactggtgccattaccacatcactgcatcgtatatactatccatgcagcttcaaaacactcaacttactcattccattagcgttaaaattatcgattcgatctgttataagccataacttataccatttaaaccctcctctttcagacacagatttcctttctgatgcatagtttctcaattgtgtgagcccccacactagcccgggtggattagataagacattccactgaaacttaaagatatgttatccaaagcaaactgtatccgccggcaacgcggtgacgtcctatacggtggcgaacgaaatcagttagcggagaatcaaaaagagctgcacctggcggtatgttctctcctgagaaaggctaaaagctagtgcaaaagaatgacgaccgtgtatgaaatcgggaaaagtctagttcaatttaatcgagctatgagtggctcgtgtggggccattaaaaagccagggctacactcgcttaggcattttatctacgaagactttgagtgaattaagcttgccttgtgtgagagtacattgcgactcgcagagatccacccggaccatttaatactggcggtgtagaatgatctactacttgatccaaagcacattcgaagtacattgttaccaatattagtccagatcatcctaatgctacatgaatacggtacgttcagtttaatacttgataaatggcaataacacgagtttcaagtttgataagtcaaaactgaggtctagcagatctcgattgcgtgtaggagtacgatacaccgggtgttcgtccttcgcttcgacgctgtccgcccgggctccctttcggccaggagtccggggcgtacagcgacgacgaaggagcattacaagtctatttgataaaacattgcgcagccgcacacctatttcgtccgaatcgcgtgaatatctaacaacaacaaaacctgtcagcttcgactcgtcgaaataggtgtgcggctgcgcaatgttttatcaaatagacttgtaagggaaaacgccaaaaggtgtgaaacgtttgtcaacaggtgtagtggtcgtgggcgtcacgtcgcgtcatatctctcatcatgcatgtactgacacacgttttggttgccgcggtgtttcggccgaggtcgggtcatacagacccaggatcgagccttccaagcacagtagtttattaacgacacgctcgtagcgaacacggtcaactaataatatcatgcagagcaactggactcgacaacttcgctattgtaaggcacaaccaacgcaaaccgcaagcgtatatagcgtggctatactaggtaggttttgcatctgaatttcggaggtgaaggagctctagtgagagcccccaaccgggggagagtgtaggtgtgtaggtgttgtagaactgtggcaacgctgaggcctggctacaatggatagcgacgttcgttgtagtccctcagccatacaattagctatcaaagtcatggacaccacgaaccgggctagttgcatcaggtagaagccttcctaactccgggttttatggatttggatctaagcccacacatcagtcactgcattcgttgctgatgcagctttatcatgcaccttaatgcgcttgaaaccacatacacttactgtcataccgacaaactagcatacacctaatgacacgagttaaccgcttttgacaaacgtttcgaattcatacaccttttgacgttttcccgacttgctggcagcactaaatattcgaatgcacgttttttgtgtgttgctatcgccatctgtaagtttccgagcacaacaccacaacctaagaaagaaaggattctgcctggacatcagtgcacattccagtggcagaaaggaaggaaggaaggaaattacgttgattagctagttgtaggtaaccatttctgcgtactacaacatgaactaaagttaaaactattttcgtggagtcctgctccaacgagcaggaagaggtagaatcaccacggtgggtttgtcaatcccaagcgttcaagtaccaattcgttggagtggcgatatatggactggcaaaagaagcgatcaaacttgatacacttggttgtacaatggtaaatttggcagatgctgatgctgcgaagcaggcgcaggagatggagtacatcgtttcccagtaagggtaaccgtacaagctagcttcgaactgcgaaaccccccgggtccaccacccgagtccccaactttaattttaaaaaatcatatgcagcaagaatttgtgcgactatcctgagatcgtacttaatcgaagtggtgtgcgacttttgactcgccaacgacaagtcaagtgatgttgtcgaccaccttggtacgctgctcgcgcgctaaaagcccgaagtcgacgggcgaagaaggccatgaaccctttcactccccccagccacagtggatgaactacacctttgcccactcaagttcgcggcagtgtccagcaacttcgtgtgaagtaactgtagtaacgcctatatttagagaaaaaatatgaattttggatttacgccaaagtggatttagtacagggaaaattggtggtcagtatatcctagcggcaccatgccgaaggagccgaagcacacgctcgccgctcgcgcgcccgtccttgatgctcatctagaaggtggggactggatgctggtagcgcaccacaatggtatccctccctctaccgcgcgtaatattgtcgagcgggggacaccagagctaaacaagggaggcggggcgcgcgcggccatcaccaagtgcacgccggagatggagggcgcgctggtagactacctcgaagagaactgtcagtatacgctctcgcaaatgcgtgatatgctgttctgtgactttggcgtcctcggttagagtcgaaccagaaacgtgcaataacgcagagaacattgagaagagcagagtgtttggagaagcgcttctaaaacacgagcgggagggcccatttattgtgtactacgacgagaccaattacaatctttgttgtaaacggtcccaggggcgggcgccaatcggaaagcgtgctgtggtgacgcttccgccgtcaaaaggcgctaacctgcagcttcagtgtgctgtctcgcctgaggttgggctagtgcataatgcactatcgtaatgcactgtgcattacgagaagaagcgtggaagcatcaagatggatgttaatgtaggctttatggactccacctatgacgctgtcaagcagcacgatgtctacaaggagcacttcgtggggaaaaaaatcgtggtgatcttagacaacgcacctgcccacaatcagaccgagaatcgcgtccgcgatcgatgtgatctggtgctgcttcggctggcccctattctccaatgtgcaatcccatcgaaggtacgtgaacttacattacatcttattctgtgtgtgctccaacaagctgtgtttacctacaattggcaggctgtttcagcacctcgaaagcacgcatcaaagcttatcttgcgctcagccacgcggagatgatgaatgttcccgacggtcagaagaccgagctgcgaatgcagctactcgagaaggcagccaagcatgcgatgacatgtatggatctccgtctggtcaacaagatggctcgccactgtgcgctgtctgtggcggccgcgatccgcggcgagcccatggagtacgggacttagctgtggactaaatccactttggagtatatgccaaaatgttagtttagtttttttaatttaattgcaaattttggctcacattccatattggttaacactatcgcgaacttgagcgggcaaaggtgtagcagcgcaccaaccagtaggtgagtgctggcatgacaacctatcatttcctaacacactcacgctttgcttgcacgcaacagaacgtgtgtagcatttcgccttcttgaggctctaatcaccaccgttccctcgtctcgactgggagtctcgacctcgacaccgatgtgtcattgctagttgtagtaagggcagaccgcaagtgggcgtcgacaattggttctagcgcagcccagcaagtggcaacgtcgacacggtctttgcatcctgcgtgtacatgtccgatggcgctgaacaagcgcttcttcgcgtcgctcttcttcttgccatcctcctcggtcgccaatgagaggctgatctagcttgatacgcatggtgtccgcgcgcgttaaggatttcagcaagctctgcaccctcgtacgactcacaccacccgcaagtttccttgctgcactagaaccaattgtcgacgctcacttgcggtctgcccttactacaactagcaatgacacatcggtgtcgaggtcgagactcccagtcgagacgagggaacggtggtgattagagcctcaagaaggcgaaatgctacacacgttctgttgcgtgcaagcaaagcgtgtgtgtgttaggaaatgataggttgtcatgccagcactcacctactggttggtgcgctgctagttcatctactgtggctgggcggactcttatgacgccgctcgagtggtagcaacccccacggacccgcatctttaaaatggttaacgtgaaaatatcatggtagtgaaagggttcatggccttcttcgcccgtcgacttcgggcttttagcgcgcgagcagcttaccaaggtggtcgacaacatcacttgacttgtcgttggtgagtcaaaagtcgcacaccacttcgattaagtacgatctcaggatagtcccacagattcttgctacatatgcgagtcagaatttgtttttgcaaaagattttcaaaaggtcaggccaaaaaccagacgaacgatgagccttcagaggctcatcgttcaactgattttttgttgagcttatttttttgtgacggtcagatgccattcatcgagcggcagcaagacgccgcttgaagccgacgtagagcagtacctagaaggcggtcaggtgcggccaagacgccggcttggcgggcggtgccttgattagctgctagctgctgctccggtcacgggcggaggattcaaacggctgccccagttaccagcgctggcctccagtttggagcgccaagagcaaattcccccaaaaatcgctactttgaaaccccctattggtggacaatggatcttgtgggtggtctattggcgaattttattactactgtagagatttgggctggtagtgcatttttaaacacttcagtgcttaaaaattgaaagtacaatgtggaataataggaggaaggaacaacgacgcctagcaagtattcgcagagtagacgagcaagtattcgcagcgtagacgagcaagtattcgcagcgtagaggtgttcgttactggacttcgcatggatgggtggcattccttagcaggtgctggtcaactgagatcaggtcctcttgtgcgtgacctggttgaaaagattgtcatccagaggccgcagacggattatccagcgaaagaaaatcgattcaggccaagcaaagcttccccaaaccatccgccttgtgacgctgcaggcttctcatctcctattgtaaagcttagtttcagcagcaatggcaatgataacatgcatccgtcacccacaccatttcgagatttcaccgtcaacagagagtgacggcacttctaactagaaacaaaactatccctgatgctcgagcgtagctgccttgctatcgttgtaataacaaaaacattaccatgatgctgcaccgctacgtaggagtacgccgcttcagctctgtcgccatggacctaccgctggtcgctttggcggaagtggtaagaaattgaatactttccggcagtcagctcctttgtgggggtctatccatacctttaatgccagcatagccgctagagacgctgcttcctgcgtaatgcgacgactcgaacttatagtacatttttattttatttttcgagccctgctgctggcctctccgttcagcgtgccatcctcgccaacatcgcgctgtgctatctgcagctggacaacggggtcgagttctagacgcgcacgttctatcgaaaccgccactcattgcttcttcgagtgtgatcccctccagctactgtggcagacgctgtgggagtcttgagctcctgcttttcgatgctcactggggtggcggctgctgattttcctgtccgacagcgatgtccacgaagattggcgccaccaacgcggcactcttctcattttatggcgcatccacacggctattgtgttccacgctctttggtgtctacggaatgacatacattccaacggtgctcgcgtggtcagccccagcattccccgcatgggcttctcatttcagcaacattaccaatatctctatcgccgatcggccgagtttcatctcgtcagcgtcgatatcaagacagttctgcgtcgtctgggtttccccgaacccatcgacgacggtgatctccctgtagctacgcggcgtagcctacgcctgtatggatccctcagcagcagaattaggtttcgctagccggctctacgacaagtctatagcctgttaatcaatttcattctttctattaactagtaatgaagcatctcagtcgcgttgctccgttgagttgcttaggggtccacaccctgcagtggagtctccacttcaggccgacgtccccaccctctaattgatcttatcaatcaccattactatttttggtagtgtagtgaagcaaacttagggctaagggcgtgtttgtgaccgttgcaatttagagtctcagtttaacccgtgcaggtcatcaaaccaataagcaattagcaacactggtggagctgcatgatgaagtcttcattatcagcacataaccttactatctgtcgcgaggtcaagatcatcaacggcaattacacaccagcagcaagagagcactaatgatgctggactatatctcgcgaaaccttagatcacggttaaccgcaagggtgaactagagcaccagcggttcaagatcaattggtggtagtcgatataacaggattacacgcacaagtggctacagccacttgtaattctaacagacacgacgtctgttagaggttcgaaagactttctcgaccatggtgtagacacaccaaaggctacatacatttacgaccaccacgacgggtggtccatagagacttagcaatctattggctgaaagcagcatcttttagccaatgagcggcatgtatagcattggaattctgccaaccagccgttggcaggttcctatcttagaatattacatttagaggaagtcacaaagcataaaacaaaaatagcagttctcattttaacccaaaaacattatttggatcacttatttagattaatctatactcggaggcccgagtataattagctctagtttaaactaagctacgcttcctcgtacacgtgcgcacacgtgtaagctaaagtagtgagccaaagtaggcccattacacctggtagcactttgtagtccgtccaacgaccgactacctgacttcgtacgtcaccgcacgaacgcggagctgagaacctttccatggatacagaggtgcccatggaaagctccactacgcctgcaactcacgttgcacgcgctgactgcccccacctgtcggatccagagtgggaggccctccaacgactgtcaacagtcattggtgaggcggctgtagatacgatgctccgtacgctaaccccgacagagcaacacggtgttgctctgggtttcatcctgaaggagcaacgcgatgttgctgctactaccgcggtgccgtccgggatgacaccacgcgcgcaatcgctaaagctcaatgtgagtaactatgtcggaagcgagggtgagcctctcctccgttggcttgtcgaactcgacactgccattgcggctcgacgtatcgtcgacccgttgtcgaaggttgcgttcgccaggtcatgtcttggcggacgtgcaagaagttgtgcgtatggacaccgactctcggatcctacgtgctttagcacgtacgagggtttcaaggatgagctcagacaagcgtttgagtcaccgcaaaacgagtttcggtcgagggcagagttcctccacctgcagcagggcaagcatgatgtccatgcttacgctcagagagcacggtacttggtctcgaccatcgtgaccaacccgatcgacgaggcgaccaaggtcgtcacgatcatgaaggggctgagagatgggcctgtgaagacctatctcttccgtgagtacccgagtactctcgaagctgcaattactcttgcaatgcaggaggagtttagcctgcggcaggctaagctgcatgcacatgtgccgaggccacagccacgcccggtagtgaggacgggaggcccagaacccatggacctctcgagtgctgcaactgctggaccccagcagtcgcaaggaaacaatgtgcgatgctaccgatgcggtagaatcggtcgctttgctcgagagtgcacggcccccgtgcaccagcagggtggctatcgcggtggtgccgggcaccgtcgcaaccaaacaaaaaacgctggacgccagtaggcgcggggcgccctactggtaatgcagttccgcgtgtcgaccttggacacgcgacactgaggactgcagcccccagtgagattcattctcgctgcaagaaccaagatgacaagcatatccttgtcatcctgaacgtgaactcgatgagagcaagcggctctcttcgtgctttggtagattctggcgcgtcgaagaactttgttcgactgcgaagtctatcaaggcttgacttcgaggatttaaagacacctcgaagtatgttggaagtacgactggcaacgggtgccgtcgtgaagaccgagaagcgcatggtacgcgtgtgcttcacgtatgaagatcaagagtttgtcgagacctttatcgccctggatctggacgataagttcgacattgtattgggcatgccgtggcttgcacggcatgatccggccatcgattgaaggaagcacactctcgtgcgcttcggtcgcgacagcggaacagtgagcgatggccctgttgccgctacgcacgcaccgacaggtgcgcgcgactccccactcgagacagcgcctaatgccgctgtcccggagcgccctgggcgcgcgcgagcacgcgcgcaagaacagctagcgtcggcgttgccgccggcagctaatgaaggaaatgtgttgacctcggaggtcgacacccgcttttcagccaatgaggacgagtctccggcctcaaggggcacggatgacgcaggcgagtcacacgcctcagctatggaggctgacgcgaatcggattggatcaggtctggccaataataagagccaaggtgacgtaacgccgtcgactccgggagtcgatggcttgggtgaatttgattcgtcggctccgggagccgacgtaccctccgtaatgggggcctccgccaataacatgatgatggcgtgtcggctctgggagctgacgctgcagttggtgcggacggttgcaaacgtcttgcaccggaaaaacttgcatgctgtcgtacagccgggctgcacgacgaagcgccgtgcgaccaagccggacttgaagtcgctcgcccgcgggatgtacccgccggcgatataaaagaagaacacccgtccatggctaagcctggacgaggtcaagaaccaagcggaaccggtctccccaaaacaacaagacggcgcatgcgaaggtcgctgcgcaagtctcggcctggggccgagacgctacaagaaatgcctgccgggcagacggaggcagaggagccgggcgtctagacgttgaacgtcgtgacgtgtacctgtgccgggttccggtacagggagatgactctcgctaatcctccgacgcaagtgtcagagttgacttcgcttggaagcacttcgcgcgtgacttgcacgatggacccatcgagcaaatatgcattatcgcggacaccgaaagaacgaagagcgagaataaagagctgaggcagttcttcatgaagagcacccctgagagcgaggacactctcagtgcgaagacgaagaaggagctctttgaagagcagagctgggactctttgaagacgagtccctgctacgagatcttgcgggagtacgcggacgcgcttccggaagagatccctgcggagcttccgcaggacaagggcatccagcacgagcttgatcttgtgccggggacgaagtactgtgtcatgcggcagtggccactgccgcgagagcaggtcaaggcgatcgacgacatcgttgagagtcgtcgcaaagctggacaagtgcgggaattgaaatccccgcacagtgctccgacgttctgtgtcaagaagccacagggcggctggcgcatcgttcatgcgtacaacaagctgaacgatgcgacgataccggcgcagacaccgataccgcgaaaagatgtcattatcgattcgatggccaggagcactatttacagtgctcttgatctgcacgataggttctatcagatcctcatgcgtgagagcgatatccctctcatggctgtgagcacgccgagcggcgtgctctgggagtggctagtgacgccacagggtctgaagaatgcccctgcgaccttcaacaggtgcgtgacgcacttgttgcgctcggtgcgcgacttcgcaccgagctacttcgacgatgtgttcgtccacagccgggctgcggacgggatgagcgatgttgagatgcacaaggtgcatctccggaagctgcttgcgctcatgcgcaagcacaagctctatgcgaacctgaagaagtgcatcttcggggcgagcgaaatacccgtgctcgggtgtctcgttgagaagaacggtgtccgccctgaccctgagaaggtcagagtgatcaatgagtggccgacgccgtcgaacgtcaaggaactgcggcagttccttggcttggccacgtacttgtgcaagcacgtgaaggactacgcgataatgatacacccgctgtcacagcttctgaagaaggacgccgagcggaattggactgctgagtgtcagcatgccttcgatgcagtcaagcagggcttaactgaggcgccgatcttggcagtggccgaccaagatcgcccgttcgacgttgtgtgcgacgcatccgacttcgcaatcggatgtgcgttgatgcagcacgatcacgagggtcgtgatcgtgtggtctactaccaatcgcgtcagcagaagccagcggagcgcaactacccagtgcatgacaaggaacgccttgccatgaagtacgcatcgcgaagttccgagtggatctactcggaagcaaaccgttcgtggtctatacggaccacgcgtcgctgcggacggctgtgaagtcgccgcacatctcgcaacggatggcgagatggctctcattcttcgcagagtataacttccgggttgagtacaaacccagaagactcaatgtggtggccgacgcgctctcgcgtcgacctggctacgccacgactgatgccgacgtcaatgccattgatgccatgcgatcgcgcaccccaacgccgtcactgttggacgacgtgaaggtcgcgtacgcgcacgacgcggacatgaagttcttgctggccaatggctcagcgccttctgacaaagctcgtcagaagctgccgaagcatcttcgtgctcgtgcacgacgggttagtgcagtcgacgacaacgcggaccgcgttgtcgtgcccaatgaccatgacctgcgactcaagatcatgcatgagtatcacgatgcaccgacggcggggcatccgggccgcgagaagatataccttcttctcacacgagacttctactgggcccaccagtacaaatgggtgcgcaagtacgtccgtgcttgcgaggtttgtcaacgtgtgaagcctgcgcctttcgcgcaggttcccttgcagtcactaccaactccacgggagtgttggcagtccatgtctttggacttcgtgttcggtcttcccccggacagccaggggaacacgggcgttgtggtctttgttgaccgcttcagcaagatgtaccatcttgctgcggtacctgctgaagtgactgcgaaacagacggcacgtctgttcgttgacatggtgttcaaacaccatggcatgccgatcgacattgtgtcggatcgagacccgcgcttcactgcacacctttggcaagaagtgtttacacttcttgggagtcaactttcgatgtcgactgcggatcatccgcagacggacgggcaaaccgagcgcgtgaaccgcgtgctcgtagacgtgcttaagagctacgctcactcgttccaacactggtgcgagtgcctgccgatggcggatctcgccatcaacaagtcggtgcatgcctcgaccgggcatacgccgttctacgtgaatgccacaaggcacccacgcctcccgagtctactcgggatggtggctccttccttaagtggggaggatctacgactgcaacgcagcagccgcagaatgccggtggcgttgtcttcgcggtgacgaacgcagtggccgggccaactgctggaaacgagctgaacgagtttagctcggacgcaatcaacttcgtgcagcgcagacaagccgtcattcggtttgtccaagacgctattgcagcttctgtcggccgacagaagctgaacgcagacaatgttggcaggggcaacacaaatgaattcaagaagggttcattggttttgttagctactcaaaacctgcctaaacatgcagtttccgacttcggggcgagcaagctcgctccgcgcttcatcgggccgttcacggtgttggcacggcatggcaacgcctacatgctagatattccatctagcatgcgccaccatcagaccttttacgtcgggcggctgaagccataccgacagcacgagccacctagctcggctggcccgaagcggaagccccagcgggagcgaacctctgctccagcgcgtgaacgcgctgggccaagcgcgcgacgcgacctcccacgtcgacagagatgtccgacgcggtctgcgaggcctgagcgactttagccctcaggatcgccacctcctgcttcagagcggcgaacccctggctctgatgctgctccacagcagcgacccgctcctcgagcgtcgggccaaggtcaaccccaggttgacgatacccggggcgtgttcccaccgccgccgcctccgatccgcgacgcccgcggctcaacacgttggattgttgagcgtattgtgaaccatagtatcccgaaaacgaaccggcaatcggttcgttatcgtattcgttggagagggtttccgccccaccaagatacatgggagccgcgggacgtggccgttagtctttgagctaggtgtcatgttgatcaaggtcgtaacatgactgcccagagttgcttcggaagtttacggtcaagctgtagggcccgtacccgtcccataattgttctcatgcgacgttccgcaactccgttctgttgcggagtgtacgcgtttgtgaattgtgcgtgtgtgtcgtacttcctgaagatttaacgtccaagtttttcgtattccttgacattacgaggcgtatgctgcgcaccgcgagggttagaatgctcccggcagtgactgtgagcgttctgatcttgcttttgaaggacgaaagccaacttttctagcatttacatgttaactgaactgcacaatgcagcgctttttgatgcgatcctcgctttactgcccttgatccctcgtttgagtgaaacgccgcgatccttgacatggctacaagtacacttgtgcaacctgagcacacttgcacgaacaagacgcaacagacacaacgcgatggacccgctcaaggctctggacatggagcatcgctcgggcatctcgcagcgggaggtggaggacttcgccaagcgcatggacctggtacggccgcctactgttctgtgttttaaagctctccgcttccttctgacccagcgttgtgtgtgtggccctgcagatcgccaaggccatggaggacgtcaagaacggcacgttcgacccgctcaaatgcaacgtacgttggctagccgctactgtccttgtcatagatttgtgttgatagctgtatcgacgctgctgtggtgctggcagattccgggctacaagacgccggagcaggaggagctggagcgcaaggagcgcgccaagcgggaggaggagcgacgcaagcgcgaggaggagcgcagacgtagagagaggcaggaggaacacgacaactggtggcacaaggccgagctgcgctactcgatgcgagacgtcgaggagaagaacgaggacgagaaagaagccaacatgagcaagagcgagcgctgggccaaccgcatcatcgccgcgtacaaggcgcgcgacgccaacgactactcgctgtgggatcagtgggtgcccgaggacccggtctcgctgcaggagaaggcggagcgggaggccgagctcgagaagctgcgcaaccgtgagttcgagacgaacaaccccgagttctgcaaccagttcaagaaggacatggaggagcgtcagcgctcgcaggaggagaaggcgcgcaccgctgagcgtgagttggcaatacgcaatagtatgtgtaccaacgtctaacatcaatttgaactgcgtgcaggtctgaagcagaagggcaaccgcttctacaagaagaagcagtacgaggacgccatcaagagctacatggaggcgctgctggcctctcccttcaacgtggccatcctcgccaacatcgcgcagtgctacctgcggctggatcagctggacgactgcgtcgagttctgcacgcgcacgctgtacgtggacgagaagcacgtcaaggcgctgtctcgacgagcaaccgcgtggcaccggcaggagaagctgaaagaggcggccgaggatatgaagaaggcctttgagctggacggcgagaacgcggacgtcgtggagcagcactcgatcatcgtgggggactacgaggactcgatcaccaacagcgagttggaagctgcgttaaactccaagcacaagactagcccctcaacgctatcggtcggtccctcctccatcgaggagctgcggttcgcactggaattgctcaagaagatggacgagcaagcaactgcggacaatggagggcaaagaagtcgggttcaggacgcgtgggttgcttacgacctcctgctgcccttcgtggagaggaacgagcacgtgcgcgcgaagttccgaacgtccggcgagatggacaagctctgcaatcgtatcttgagtgccttggagccaccagaagctggagctgaggtcgacagttctcgtttacaaacggaagaagtgatcgttagtgcgatgatcaactgcgcagcagctgcagtggctgacacgccgcgcaaccaagtggtgatgttccgtcacgtggacttccggaagctcatgttggcatcgtttggagctatgggcaaggagacgacgacttctagaccaacaagaacctcatggttagtccaagcaagcgtcacgcgctttctggagcaggcttttgactcgaagagctggcggaacgcgatggtgtcatcggaagaggtgctggcatcactattagcagctttgagtcttcccatcgacgaaccgaacgtgccgcgtgacgaaagagcttcgaaaagggcgattacattggctgcgtccagcatttgtttcacgctgagcagtgacagcgctggcattcaggcctttagtagacgtagcggtgactgtctcgctgccgtcgcccaggcgctcgaatcaagtcgtcgcgccaagtccgctgctgggtcattgcaaaatctgctggggtttctgaccaacttgtccaccgacagtacaatccgcaaggccattgagggcaacaactgtgtggaaactcgtcggaagctcgttcaggtcctgcttcgaatcgcagaggcaacctacagcagcgagcagccaggaccatcaacttctgtggactatactatctgtgagcgagctctcggcgcgctgctgaacctgtcgttctctgaagcctcacaagttcggacgcttcacttgctcgagtttaaggcggtcaacgtcgttgagagcatcctcacgcaagcaaacccgtcgaatttttcgtcctcgatcctcattttatcacgagctgccagcatcctgtgccgcctgcattctccctgcagaggagaggagacagcgaaagatgaagtgtttggccgcctcacggggcaacagcttctctctcagctcttcacagtgtgcgagtatgccaactcgagcttcagtgggaaagcgtttacgattccggaggagctttggcagctttgtgcgcagatctggtgccacttcggctggtgcgcccacctcatgagcgcccgatctttcctgcgcgagaagaaggccgtgccgctgttgactcaagtgatagcgcttgcaaacgcgcagaaggcctaccaccgaccgagtggggcgacgactgcgtgcgagagactcgttgggaatgtcgtcaaggtgctgatcgccatggagtccgatcgtgatccaggtgacaccaaggcattccggaagaaaagcacgctagctgtactggtgaaggctctacaggacctatccgacggcctcgctcgcaagaacgtggctattctactggccaagttgtgccaggccgactcacaggtcaaggacgcagtgcgcgagctgcgagggatcgagatgatgctgactgtgagtcagtcgctcaagcagcgccccgcagtgctgtcgcgttagggaacgagacacttcgatgaaaagcttttagctgtattttgcagcggtatctgactgttagcactatttttcactctagcagatgtgcttcaacgccgaccgcgatacagcagctaacacccagtacaataacattcacatactccagagttagctttgcgtatttacatgaacgcacaaagctttcgtagtcatcttacctgaggaagagcgagaaagggcgcatatatgagatgacgtacttctgcatgccagtttcctgccaatagagcacaaaaatgtcagtagaaagcaatcgtgtaagaagcatcgattccatgtatgtactcacgccctccttctccatcttgaagagagtatagttggtcttcgagcagcggacgtctgccatgggattgatgaatttctgcagcaatgacatgaattagtcaactagcaggcttggggttagtactaatagcgtacgacccacctgaatgttggagcgatagacctcactcttgctgtccacgggcgttgaacgagctcggaaaaagtggaatcttgtagcctgcataggcaggttagatcagcgtattcaataatgtattattgggtagcaaccctaccggggagtttaggcggacgctgagctcctgtttcctcgcctcctgcttgatgtcgaaatggactcgccccgccgccttcgtggccagcagtcgaaatcgcttcgtgtctgcagatggagtcatcagcactttccctccgtagcacgagtccgcccagctagttgtgaagctctcgtccaagctgcgaggtacagacacgaaccacatttatgagtagggctgcaacagtgaataccttttgcatggggttcatcacctaaatcggaacttgttcttgttgagtcgcttccgagcgaacagacaaaagtccgtctgactgtcgtgaacctgcgggatgtagatccggaagaacctggtcccgtagcgaggaacctgccacaagaaacacacaagtctgagtattagataacacttttttccaatgcaacatttgtagaacttgtgtttacctcgacaccagtggctagttccatgacgagaatcgagaacgttggaggtgtgtggtgcaagaaggccatcgggccagtgacgttgtcgcagttgtcatgttcctgctatcggcacaacggatccaatcaacatgtgagctacaaaatattccacgatgtggcatctagagcacgaatctcaactaacgtcgtcggtgattgtcttcgtgtcggaaggtggagctttggtttgagtgggactgctcacagagcgagtcgttcttgcagctacaggagggactgttgctcccctcgagccgtcgcgcttgggagatggctcctcgtccatgggggccaccgaatcgtgcttgggcgagtcattcacaaaccagtcttggcactcgtctccgtcgctggcattcgagtctcgatcctcgaactcctgcttcagtctacaatactccactcagtcaactcagacctcactcaactgcactagttacacgctcactcaccggttggcgaagtcgcccatggcgctttcctccatcatcggggacggcctcgccacttgagagtgaggcgaattactacgggcctacgttgttctgggcgaaacggagaatgtcgccgatgacaatttgcgccaaattcagcggggtcagctgaaatagacaatgagcttactcaccgacgtgatgcgtctggacatgggctccacacgcagagacactgtctgggtgggtgcctttcatgtcatatcgtcgtcgactatcctacaatggtctatgattcattaattctgctactgtagtgctctccattgcgatcttatctttcgctggagcatgctggtcaccatgtccatcacccttaccccccccccccctaaaaatatgaggtgctgagctcgtctggcagtcccattgatgccccaacgcacgctgcgtttgcaatgtctccagcagcggcttcagcagtctcggagactcactacgagctcatccgagacgccatcttcgacaatgaccgcgctcgcgtggccgaactgttggccgtgcctggagtcgacgtcgatcacttcgacgctggcggccagacgctgctgcacctcgcgtgcttctgggggcgaatggacttgaccaagttgctgctggcggcgggcgcgagtctcaagacgaaaaacgcggccggatacaccgccttagacctcgcgacgcattggggccactcggccgtggccgaggtcatccgcctacgcggaggcagcagcgtctgggaggacaagctcggagcgctgcaggttgagctcgaagacctcacgctgcgcgcgcagcatcttgacactcagaacaacgacaaacgccgtcgccttgatgccatggcccttgacttgcagtcaatacagacgcaactagcggaggagaagagcgcgcacaccctcacattggagctgtatcaacgcgcgcagcagcagctgagtagtcaagttgggaccaaccagcggcttgagcaggagcgcgcaagtctcacagagcagctgaacgagtctcgggtggcgctggccaacgccgtgagggccaaggagcgggccatgcaagacatggcggcgttgaaggcgcatcgagacgaggtgctggcccaaatgcaggccagcgtcaagcagcaggagctggccgcgcacaactggcagcgggccgaggtggccgccgccatgtcggactcgcagcgcaacttcgcgttcgccgagcgcgaccagttccaccgcgcgcaactagcagcactagctgagctgctggtgacgaccgagcgccttggagcggccgaagacgagctcatgaagctcaagacggacctggccgagcacattttcgacatgaagcgcgagcaccgcaagcagaagcacgcggcccaagccatggcctccaacaaccgcgtccagggcggtcgtcggcccaacacgactcctgttgagatggtagcagtaagagaagagaagaagacgcgaaagcccgaggaagtgcagcaactgctgcaggtggcgagggccacgcccaagaaaatattctcgcttgcggcccgtgagtatggtgagcgcgtatacttggaggagcagcagaagcttcgcgagcggaagacgcgccaacaacgcgtggggaaccagtaccgcgcggttggattccgagctcctgtggtggacgcggaggtcttccaggaggagttcgtgtccaccgtgcgcgcgttcgcgtcgtctcggagcgagaagtggcagaatctcaagcgcgacagagatcggcaggctcgttatgccactacaacactcgctcgaccgatttccacggcgccgctgccgcttgatccaccgccaggctcggacggaacgctcaactacagtctctacaggaagtacgcgctgccattaccaaagaattcaaagctaaggcctgtgacgagctgcacggagctgcgtaggcacgcagactttctgtccgaggccaagaagaaagtcgcggactacccgcagctgcaggaggaaccaacgagcacagaagacgagaaaccgggaagcttcttgcccatggtctagccaggagaataatccatgcgtctacttgtgtgaaggtcgaaagagtttagctgatgaagaaggaggtggagtcttgtccccactcgaagtagcgcttgaaacccgtcgtctccccgctggagtcgcagacttgggtcgttcaagccgttgtcgtggattacttgaggacggtgcgaggacgggggagcttgcttgtcgaggagaagtgctggatggagagccttgaggcttttgaggcgtctgtggcgctgcaaggggggccaagtgcacgatcatgcatccggacagcgggtcaaacctctcgagttgttgctggtgtttggtatctgccacattcgcactcgcctttcgtgacgcctccaagacctgatgaacttgcgcgtggctgagctgaatcattgccgctagctgcctggtctccttgtcatgcatggctcgtgtcagtgccaagcccttctgcgcgtcggtcagtagtgtcttggtcttctccagctctcgtcgatggctcactctctcctgagcagcgtcttcgagctccaccgagagctggtgctgcttgaccacaaggctctgcagtctgctgcgtagcttgttgcagagaatggcgtcgcccccagcgttcggcgtgttctcgatcacttccagtcgagcttcgaggcctccgttcacgcctttcagctcctgccacgcctcagtcagacgctggttctcctccttcagacttttaagggcacgttcgtgcaccaagcgctgctcttccagtctggacgcgacgatgtcgtccactaaaccagccagatcatccgcgaaggcgtcaagcagagcgttcgtgctgtgccacgttcggtcgaggaacactcgcgtcaagtcaaagaggtgcttggcacccttctcgtgatcttcgatcgcctccatgtggctgtccgccgatggcgagcctgctctgtccagcgcctccagggtgtgatgcagtgagcgttccttccagagctgcacgctcgagaagaattcttgcagagggtgaggtggtgcagtggttgacttggaagacttccccctctcgtggccatcgccgcagacctcgtggaactgctgtttgagcgtgtggagccgcgatcggatcgttgagtgaagaggaggcatcgccttgttcgtggcgctcgccattcgtgtcgagttgtggccagccagggaggtgatcgatcgatgggacggagcaccagtgcgcccatatttatagggggctgagctagttgacgacgcacatacatgggcgactggagctctgtcttgagtattatcagtcatgcgtgatgctgttgctctctcgggtgagggggtcccaccagcaccgccgacgctcgtgccggtgaatgggaatgggctggacacgtcgttccgagacgtgatcctgcccttgagccggtacgagctggtgctggtcatcggcaagtacgtcgtgctgcacaacacgcagacacaggagctgagcttcgtgacgggccaggagcaagctctgggcgagatcacagccatggccttgtgtgggaagcgccgccacctctcggtctgtcgagcggcagtgaaagccgacgatggaggcgcagacaactcaaactccaattcaagctccagctcgccagcctccatctccgtctacaacgtcagcagctccaagagcgacaagcttgaagcatcgaccaccaccggcaagactggagccacgcgccgcatttcattgctcaagacgctgaccgtgacttggacggacaagttcgtgggcaccgccttgtcccccgacgggaagttggtgagcgcgcaggctgcgaacgcgagctggagcttgggcgtgtgggactgggggcgcggccgccagatcgcgctctcggacgtgcactgtcgggtgtctcgcgtgcgcttcaacgtcatcgacatggcccaattgtccacgagtgggggcagtctgctgcggatctggacgctctgcgagtacacactcaagccgctggcgagcttcaagtctggcgacgagacgagggtcaagaacgtcgtgagctacgcggatcacgcgtggctgcccgacgatgtgctcgtcggactgcttgaagacggtgacgtgcagttgatagtgaacgcggagctgatccagacgcttcgagcagttcacaaaggactggggcgcatgctgtgcatgagtccgctagctagcggtgaaggagtcgtcgttggcggcacccacggcctcgtgtcggtcattcgagtggcgtcgaagatgctcaaggccaacgagaaggagctgcatctccagcgccggatgcgcgtcccccacacgtacgtgaacgatagtcaagactcctgcgtcacgcgtgacgtgctaactacttgatgtgtcaatgttagcgagcgcatagtgagcgtgacgacggatcctgcggccgccatgctcctatgctgcactgagaacggctacggcgcgtacgacctcagcaacatgtgcctgcttcgtggcgacgacgagaccatcgctttgagctccttgtcgtccacgccgctgtcgcaacaaatggaacgactgagcgcagcctcgagacgtccgtgtttcgctgcggcctgccgagctccagacggagacgcagcagtgcacgtgtggaaccaaatggactgccacgagtgcttcatctcgcacgcgctggagcagcagacgccgctgagtatcgacattcacccagcgggctccgagttgctcgtcacgttctcgtccaagctccagatcttcttcgtgctgcacgactcgctgcgtttggccttcgagatgccgcagaagcagctctcgctcgcgcagtacagtcccagtggcgcgttgttcgcagccgtgcacgctaccaacaaggctgtgttcgtgtatcgaagtctatcgcgcgtgcagcgggaaccgcagctcgttggcgtctttcgagagttccgcgacacggttgaggtcttccgctgggcggttcacgacagcagcttcttcgcggttgatgcggctggggagctgcgtcactgtcaattgcgctggcaatccggaggagaagtcgaggacctgatcgtatcacacggcgtggcccagacacttgcgccgggcaatgccgtcgtggcgttcgctacaagctacatggaccgagagagccacgactacgcagtcttcgtggccgaaaggcgtgctgttacaggcttgaacaagcgaagcagcagtagtcactgtgtcatccgagcgtggctgaatggggaactagcattcgacgctcttcacagcgccaatgggttgggtgttggcgagaacatgccgttcgaggtcacctctcttgagactggaccgggcttgggcgctagcacggctggtgatggcaccgtgtactcgaatctgctgttcattggcacatcgagcggctcagtggtgctgttcagttggaagcgcgggcctcgaaggagcgagagtcactcgaccattctcctaacgcaagcggttaagcgcgtggacctgcacacagctccagtcgtggggttgttctacgcgtctcggtcgcgcttgctgctctccaacgcgaggaatggcgtcgtcttggcgagtaaactgtgtcgcgagagttttggggatggagagagctcctcggccttgacgaccgccatccgagacgaccagaacctccacgacttgttcatcaactccttcacaggcatctgtcaaccggaggagctggccgtgtacgaccgcaacaaggtggagctcactcgactgaagctgctggacctggacagcgagctgcagcagttcaagatggagaacgagatgctcactcgacaggtaggtgagcagcgaactcgcttcgagaacacgctccagggccaactagcagcccaagctcggacggctgaagagaaacagaaggagctccgagcagagcttggcactcgactgggtggcgccatccacgagcgggaggagaagctgcgctcgttgtccgaggatgcgcgctcggcccaggaccattacttggtgacactagagaagcttcaaacggagcgcgactcgctccgcgagcagcttcatgccgccaagctgaatttggaagacgagcagcagcgcgctcaagagcgcgacgtgcagctcgagtacgacggcaggaggaagctccgagaggccaaggcgcagtacgacgcagcgcagatgaagctggccgacgagctgaagatgacgaagaggaagctgcaagaagtgctgcgccaacaggaccaagaccagctcgttcagatggggttgctggctgcgtccatcgactgcgagaagcagaaggaggccacacagctcgctgagcagcacgggaaggccgccgcgttgaatcaagaggtgaagatgctgctcagcgctctgaaccagaaggacggcgagctgcagcaaatgtgcggcgactacaacgagcgtgtgcacgagatcgagatgctacgccagaagctggcggacgagagagcgctcaccaagcgagtcatgcgcgagaaggatgagactgccgcgcagctcgcggagcagcggaggttgttcgagaacctgcagcgcttagacggcgtgcatcgctcgcagctcgagctcctgcagaaacacattctacccaaagaccgcgagttggctcacatgcaggagcacctcaatcagctgcacgacgccaaccaggaagttgtacttcaggccaacatcagcgatcgtctgagggtggagacgtcgtcactcgccaggaaacacgcgcgcgacctggagacggcgctcaagcgtctggagcacgtccgacactcgattgtggtgctgcaagaggagcttggggagctcgtccgacacagcgcagtgcaggagaagagcaccctcgtgacggagatcggtcgactgcataagcgcatgacgcgccaactggacgcgctccaagcgcgcggagactccgcggacgaggtgaacgccgagctgcatcgccagaaccgcttcctgctgcagaacaaacactcgctgcgccgacaggttgaagctggtaacctaaagaagcacaagctcgcagcagcgctgtcttaccagaacgcgtcgctggtgacggagctgaacacgtatcggaagaccaacaaggagctcgagcggaggcttcgacggtatgaagagctcggcgcgaagtggaatggaacagcacgaagttcaggctcaagtcgagtggagacgactcggagtcagaaccaggagggtccagagacgaatgatgtcgccactgagctggatggacgcaagttgttgctgccgacgcagacatcagagccagcagagcggaatagtagcaatacacagtcattgagaggcagacgagagcctccacgagcaaagtctcgcccaaagtcagcagcggcgtccagtacaagaagtagtttactctaacaaaactgtagcaacattgtaatacgttccattgattgtagacttagcgtgctcgctctgaccgagaaaatgccgtaagatgctagttgttggactgtcatggattttaatgggaactttgattgttatcaactaccttccacgctcttaacgctcgtcttggtcttggtttggtgtcaaagatctcaggtggcgagctatccgacgcacacgctctggtaggtggggacgaggtacttgatgttgatgaaggcatcgtcgccgccgtgtgactccatgatctcgagcgtctgctggatgaggtcgcccatattcagctgcttgcgctggccgtagtcgatagcgtcaccaatgttgtctgtatagttgatgccaagtcagtcagtcatagctcaggcccccatagtagaaggcactcgagagcttaccgttcttgcgaatgaaaatgttgagtacggggagaatctgccggtagtacggcacaagtgcctggccgatgagtcccgggccgctacctggctgtgccgcggcctcgcaggtcaccatgagctgtagaatgtgcagcgtcttgacgatgatgccggcgttgcgcgtgttgagagcgtctagcaacaaaacaaagtaacgtgtgagatcgaaagaggttgccaggcgtgtcaaagtctacatcataacgcacttttgatggggatgataagctgcgggatcacaggcagcactttgttgctggcgttgatgagcatgtccttgatgccttgctccgacaggaacgcgtagggctcctccacctcgcgcagtccatcgaagaaaatcggaaggtagtggtggaaatcgagctgcacagcccacccagttagctttgaagatgcctttccaaaccatatttgcgtcttaccttcgtgatgtccactttccatgcgaccatgttgcgcacgccgccgtggtcaatctgaatcggtaggtcaccgcgctcgtagaacctgcaattcaaccacaatgtcagaaccactttcggtagtacctaacgacattagtcctgcgtttcaccttctgaacgaagtgtccggcgggttggagcgttccctaaatgctaccggttgctggtgccgcgagcgaggagaaccgccttcatgtttgtctccctggagtaaggccaacgacataaagcaggtgagcttgcagcattcataccgagacgtcaccatcgctaccgaccttgagcgttttctccagatcgaccgtccctcctgttccttggcccttgcgaaggaacgagtcggtggtgtgtggcttcgacggcttcgacaaggagaaggcgctgatgtgctccgcgtcgttcaccttctcgtgcgtgcgtcgctgtagcacaaactacgtcaaaacacgagctcgaaacctcataacggtggtagaatctcctaccttggggatcaccgcagtcgtgtcgaagcaactgccggtctcggggagcgcgatgttcttcggcacgatccgcgtgctgacgttggggatgcggcccgacatggcttggctaacgacttgaaccgcagctattaacgctccacgtctcgctcgtgctgctcactgcactcgcccacgctcttttctcgaagtgccggcgccagaacaaaacgccttcgttgctcccgataaataaagatgacgagggaggcacacctcgccgcttatagctgtcggccatggtgtcttatgctcaagtttcacattgcactttggataaggtagtaatatgcatcgtttgttactctacacagagcctctacgacatcaactcagacccagtggattcggcaccgagggaacttgtgcttgacggtggagaagtacgccgccgtggtctccatgtcggcgcacgcgccgatgtacagcgtttccagcggggtcttgcgacgcgccaacgcacggaaggcgtcgattgtgagctggttgcacgccttgatgttgaggtgcagcaactgctgacagcgcgagacgacggctgcgaagccctcgtccgtgatgttgtagcagaactcaaacgacagtcgctgcaggtttgttgcgcgcggggccatcgccttgagaccgacgtcgtcaagagctacgcagccctgcagtaacaaggtcgaaagctgtgtgcacccagtcgtgatggccaccaggtcgctgttctgcaatgtcctgcacagcgagagattgagagactcgagttcactacacttggcgatggctgcaaatgtggcgctccccagcgtctgtagtgccccaaggttcagtgagcgtaaggtttgtcggttgacggcgatcagttcggccacgccacgatcatccagacctgcacacccactcaagtccagcgctgtgagctcacacacggatctgatcgacttcttgtgggcgatctgaatgaagtcgtaaaagtcggcgccctgcaccttcggacagcgcgcgaacgacaacgaccggagattgggctgcattctcatgaggaagcgaagggcgggcccggaaaccttcagacagcgatccagcacaacctccttcagcgttagcgacgcgtgctgagccaacgccacgacggacctgtcggtaatgcgccggcacatggtgaggtcgaccttctctagattggggcagttggctacgatggcgacgatgccgtcgtcccgcacgcgcgagcagccggacacatcgaccttggtgagctttggacacgcgcgcgagatggccaccagcgactcgtccgtgagcttgatgcagtgcagcgccagcgtctgtagactcacgcagcgacagagctgctccagcgccgtgtccgagatctgcttggactcgacgtccacgtgccgcagctgctgggagccgaggcccttgaccaggtgcgacagcagcggcgacgtgactcgcgggccgtacagcgccacgctctggagctgcgaggtctccacggacaagttccggccgcttctgctgcgtcgcggctgtcggtcgagcagcacggccgcggccgcctccagctcgtgcttgcctgtgcaccacgtctgcaggcacagaaagtaacagggtgagtcgatagctaccggtatagtaccaacacagcgcatagagaccttaccaggtccacgtgctgctcacggcgcactgacgcgagcgtgaggcggcgccagcgcctggagacccgcgcgagtccgtgccagcggtcctgcaggtgcacgaagctgcacacgtgcgccgagagcacgtggtcgggcagacgctcgatggccgcgggcgtcgtcatggccaaggccgcagtcgcagcgagtcgggaagtgggccattccgtcgaagaggcgtaaccacttcaacgtcgttgaagtgggtgtgtaccacacacctcaatagccgattccatcgatgcccgacctgctggccgactgccgcgagctgcagcgccgcgggctcctgtccgcgcagcagctgcaggagctcgagtcgtctctgggctgcgccgcgtccgcgccggatgccgtgcgcgagcgcgtgtcggcactgctcgtgcaggaagcggacgccatcgtggagcgcgtgcgacagcagtgcaaccagcaggagcaggagtcgctgggcaactcggagctggccgccgtggccgtgggcggcgcgttgggcgcgttgaacgcctggctgcggccgaccccggccccgacggccaccgccaaggcgccgacggtctgggccagcgcgtacgacggcgccatggccaccctcaacgtggccaagcgcaagcgccgcgtgcagcagctgcagctcaagctgctgggcggcgacgtggccacctgcagccacgtcgtgctctgcatcaacggcttcatgacgcagagcgacgacccgacgcgcaactggcgtgcgtggacgcagggcgacgagcacgccgccgtcttcgccgtgcagtgggaggccggcgacgcggccgcctggaacgagttctgcacgcacgtgaacgacaacctcggcagcgcatccgtgtcggccatggtcgcgcacttcactggcaacccatggcacagcgcacagggcaaggcggagcaggtgggcgtgctgctcgcgcacgtgctggccgagcggccagcgctgctgcgcggacggaaggtctcgctgttcggccactccctgggcggcgccgtcatctacagcaccttccaggagatggccaagctgcgggagcacaagcaaggcgacggcctgcggctgatcgccaatgccgtgagctttgccggcgcgttcatccccgacgcgcaggggctggacagcatttcacacgctctcgacccgaacggaggcaagttcgttaacgtgtactcggtccgtgacggcgtgttgtccaagctcttctgggcgctgcagcttccaggcccgaacggcccggcggctgcaggctgccaggccgtcgctttcgctgcagcggccaccgccagctgcatcaatgtggaggtgtcggacctcgtgcttccgcgcgtggagaaccacttcggccacagctacgtccagttcatggaggccatcaaggcccgcgtgctgccgcacctcttccggtcctagaatctccagcagcagcaacatacagcaagcacaaagagagccacacaacagcgtatctaaccataaagcacctgccattgacgctgcagctcgtccacttcctccttctcctcctccatctacttgaacatgttgccgaacgcgctcttctccttggcccgggcgtccgcgtcgtacgcgcgcttcttgacctgcagggcgcggatctcgttcctcaccgccgcgttcttgggctcctcctccagcagctcgctcagcatcttgtacgcgcgctcgtagtgcgtcagctgcgccatggcctgcgccttgcggaagcgcgccttgctgtgctgcggctccagcgccagcaccttgtcgcagcagtccagcgcccgctcgggctgcgcgccgagcttgaggtggcacagcgccatgttggaccacgcggccaccttgacggcctggatctgcgcgccctgctcctgcgaggccgtcatgcccgccgcgccctgcgcgtactgcgacatggcgtctcccgcgaccgacagcccgttcacgtaggcgaacaccttggcgtacgacgtcagcgcgcgcttgaactcgccctgcttggccagcaggttgccctgccgcttcagcagctccgcctcctccaccttctcccccacggacagcgcgcccaggcgcggcttccacccgcccagcagctcctcgtcgctcacctccagctccacggcgtccatcgttgatgagggtatcttctgcgtaaccaagtggtgtaacccagttacgccaacttcaactcgcaccacgtctcgttggtgttcgctcacgctccgatgtacgtctgcccatcggagcgtgagcgaagcttcctcctcgaactattatacatgttgcattgagtagatggctagatatctcgcggcatgcagcgtaagatcaagcacaaggtgacgagttgtagtctcaaaacctagtgttaataacgaggtgttattgcagctatgtatgcttcttagaccacgagaattgggtcgttcaaacggattgaagcaagtacgcgagcaaggcgacgtggacagggggggcagccgctccgacgaggctgatgatgccttcggggtagcagtcggggtcttcgtcgtcgacgtactcgagccagcagccgatttggacgttgcggcagcagtcgtcgcagtcggcgtagcagtcgtcacggttgggaccacgatcgtagttgagctcgtgctgaaggaagtgagcgacaaggggccggcgagcgagacgaatccagaggtctgctggttcgtggtgcacgtgttgccgctggacgaaccggaggcctcagtcgagccgacaagagcgacggcggcaagagtgaggatggtctgcatggcagtcggttcgttggcgggttgtgaggaaagtagtttgtgtggaactgtgcaaattgttgagtgaggagtgaacgcagcttacccaggtacgtttcgactcgaaaggcttgccactacatgtacaccactacatgatcatgtactgtggtgcaagtagggcttcatggaaatgcatgcatcatcgatggaactgttatcgattacaggacagagtacctcgtgctgatgagtcctgtaatcgttcccagtgtagcggatccggtagcgtgtcggactgcaacgaacagacgcacacgataacgtcaataaacggtgagaatcaggacttctgtatcttgtatcttgcgtgcccgtctcaattgtaggagcaagaatcggagctgtgtaccatagtagcctatcaatcgctttttttttaatcaaggcaagaagtgggcatggttgaggagtgtgatggaaattcaagttcatttgttgcttttgttgactgctctaagcctcacctgtagaagaagacaaaattgataaccgcttccttaacgaacatctcgatttactaggtacctttacgtaaatgggttagctgttcggcgagttatcgacgtgaggaatccaaagttgacttgctagatgcggaataatttgcgcacggttttcttcgaatttaaaaagaccgctgattccaccaatccaacctcttctgggtgctgctgaattaattggcactgccaactaagtgacgctttcacgttttgtgtagtagcttctccaaaggacttgccgtctccagcctaatttacttgcctttacgaactagtttcgaaaatcgcaagtctgaaaagctatggagggcattttctatcaactgagtggccataggctatggcccatagcatgccgcaacaagagtacggagtaagtcaaccagttttcaaagacgagttgcatcagatggatccatggggcccactgagcgcaccatgcaaaaggattcacaatgcatagctatccctgcacctagcgattacattacattgaacaaagacaacctcatcgtcctctaatcgaatgctgatctagcgtgtagtcgaaactgctcgctcgctactaaaggcgctgcactgacgtcgtgcttctcgccaacgagaaaagaggcaagaatttcatcgtgcagtgagaaaaaaaaatattgaagcaacgtggcaccccatcaccaagttaacagctgaagctacttagtcacgggcactaaatggaagactactggagggaggtgcaatgctacagctatataagaaagttcctattctcaccccaacacttaaggcggggacgggaggaggtaccaagaatcttggttatgtatcttggtccaagatacataacttctgattctcactgttcactgacatgaccgtgtacatgtacgtctgttcgttgcagtgtccgaatgcccgactcctacacactacttcgggagcgattacaggacccttttacaaaagtaactctgccctgtaatcgatagtagtgccatcaatcatcgatgcactcatttccatgaaacgctattcgatatatgaagatgtagtggcaagctgacaagcctttcagctcaggacttgtgtaaaccgtgttggtcctcattccctaatttgcacaccttcacgcaaaccactttcttcccaagccgctaacgcacctgctgctatgaacgcgcacaccatcctcgctcttgccgctgtcaccttcgctggctctgtcactgccgacacgtgctcgtccacgcagcagaaatccgcatacgtgacgctcgccagcgtgttgtcgctcagccccttccaggggtgcgcgaccgactctggctacagcctcatgtactcaacctcgctaccctcaaacgacgagtacgtcaaaatgtgcgcgtcgacgaactgccagtcgctgatcaagtccatcatctcgctcaacccgcccgactgtaccatgtcggtaccgacgagcggcctcaacgtgaacgtgcacgagctggcgaacggcttctcgtccaagtgctcgtcgctgtcgaccagctcgccctctgttacgaccgcagcgccaactgcgacgaccgctacgccgactgcgacggctgccaccccgacggcgacggcgcctaaatcgtccaactcgactgctggctccagtacgtcaccgacgaaggccccgagtgctacgactgccgcccctacctcggctcgtgcctgctaaagctttgacgaggactcaccaaggagccagcagcggcctctcctctttctgcattcttccctcggtagcgttgggctagcgagccacgaaacaaacagtgacgtgttgagcattctacttcagtgcgttctagtgcttagacctccaactccttgtcttctgtcttcccgacgtggcgatcatattcgcccacgtgagccgggaaacccacttcaactccccctcatcatgcaaccgatctcccctcattgtgcaacccctccgtttaacacccttttctggcgcgtcagtggcgacttgcgtttgcggcgggcacacgtccgcttccgcttacgcacgcatagcatagctagcatcgcggccggccatgagcggagtggccacgctgtccgaggacgagtacgcgctggaggacatctcgtgggacgagatcgacaagctcaagtactacgtggtgggccccaccatgttcctggccgtgcgcgccgccgtgtacccgagcaacctggtcaagacgcggctgcaggtgcagtccaagcacaagccgctctactcgggcacggccaacgcgttcgccaccatcctgcgccaggagggcgcgcgcgggctgtacaagggcttcggggccagcacggccaacgtgctcacgggcaacctctacatctcggtctacgagaagtcgcgcaaggtcttcagggaccacacgacggccggggacaagtgggccaacttcgcgggcggcgcctgcgcgtcgctcgtctcgcagacggtcgtggtgccgctggacatcgtgtcgcagcgcatgatgctcagcggccagggccaggacgtgcgcaagacgcgcgagcgcgccaagggcttcctggccgtcaccaagcaggtcttccgcaccgagggcctgcgcggcttctaccggggatacgtgccgtccatcgccacgtacgcgccgtcgtcctccatctggtggggctcctacggcctgctcgtgcccgtgtactatagattgatgaggaagtgggagacggaccccttctggaagcaagtggtggcgcagggcctgagcggcgcgagcgccggcatcatcacgggcgtgctgaccaaccccatggacattgtgcggacaaaggcgcaggtatatacgcagtacggcgccatggacaccctcaagtatattttaaagaccgaagggccgatgggcctcatgacgggcctctctgcggtacgttgctattgctgctggctgctgctgcgtagttgaagtaggagcgactgactaactaactcatgttgttgcttgtcgtggatttgttgcagcggctgctggcgatggggccgtcgggtatcctcatggtcacgtcctacgagttcgtcaagcgcgtgtgccggaaaccgcaggagccagacgccgacgccgacgatgatgcgtaactcgaccgctagatagtatccacacaatagtttttgccgagccaagccctctccagagagagagagagaccccgtcaatagacatcgtttacattgtccgatcgagctaccagcatatctagcacctactggcctccatacgcgggaggtacgagctaccgctgtggaagttcgttgcccatagtgtgtacgagctaccactgtagacgctgtccgtacttgtccttaaaggacccttctcaatagaactggctgaacacacgcttgccatcgagcgcccgcgaatcaacagcacacgtaaatgtttcctcaaagctactcaaacttggctgggagcacctgtggtgtgctgcatcagtactggtactgatggtaattgatgtggcaagggcaaactgcaacatgcacaggtgtagccgtgcagaggcctcgcggcttgctggatggagttatgaatagcgacatgtgctatgcacttcctgccgataactgaaaattgccttcgaggctactgggtcgacatacttttggcacggtagtgtagcggcatgtcgagtaacggtacgcaattaaaccgttggggatattcaccccctcattcatcgagtgttcccagtataatacttatcgcactcttcttcgtctgaatattgctgtcggtgtctcgctttatcacgatactcaagcggttgtgttacttgatttctagtaaagtttgatgacttctgagtaatttcagaggagacttctagttatctgcggaaacccccggaaggaacaggaggggagtacagcgcgagtttgtatgcgaaaaaaactaatttgcatacgtgaaaaaagttaatagggaattcaagcgtcaactaaccgaaaacaacctcagacttgttgtagcatgttttacaattagtgaaaaccagcgcaacagccagcaccttacgctgatgcaattagcttctagattgtatagtgaagtaacttcgaaggaaaccatgcactcgaaagtccgagcacattattcgctactctagattgtaggtagccgactaaaccgcatcaaattcaaactcaaatttactcactactctgaagtcagagggatgtactacgacccccagatgtactgctgggaatgtgttcctaagagtcgctgttgaccgcattaaagcccttgcgagcacacgtgcgactacagaacttgtgggctgacttcttagcacaaataaagtgacgaacagcagcgttaacattgatattgcttgcatttgccacacagcttgtagctaccggtacagaagtgatgcacctgtcggccgcatacacaacacggagaagtctccgatatggtactcctggcaattgctttgcgcgcattaaatgacacgttcacgtgcggttggatgtcgaagaattgagggatcctaactgatgcgtgagtagtgatagcagcactacgatcagcacagggctcattaaaccaacaaccgaaaccccataaaacctttattgagttttctttaacctttactccccacagagcccacgcgtgggcccatctataaatatttgtttagaagctgctgggaatggctagtgtacgtattgtgcctttcggtcattttgccgagtcctacgtaggactttggaggtcagttaatctgaggttgggggtctctaaatctgagatgcaaatctcggacgagtccgatgagcggtctcccggaggctctccgttcaatggacgtccaagccaagcaagctttgtttggggaagcaatcagtgatggaacccacgaaggcgaagggagaagacttggttgtttaatgtatcgaccgcatcgtgcttacctaggtttattctgcgtctgacatacaccgtattagagtcagctcgtatgaaagtcctgccacaagacttgacaggagtccttcgtaagacctcaaaccccgaatgccgtgagaatcggcgacattcgggctttcggctgtttgtaggacctacgcaagtgcttccatcggactagcaattcttggtcctaattccctacgaggggcctgctaatcttgtaacggggttacatggaatagtgaccctgccactattccgggatggctacatcggtcactcccctggatagtgacccaagtggcctcagagccaacagatacattttgtatgacacaaactatagggaacttaggatttgtatgcaggccaaatctgtaccaacctataaatacattcagtcttagatctaccgcttttcaagtcaagtcgtccccttcagaccagggacacgtgaacggctgttcacttggagtttgtatactcctgcttcctctgttaagaagtgctcacacttggtagcacttgtagtcaatcctacgcctacgcgggtagattggactacctgaatcctctgtggtctcatcgagtgagccaagatggatcgtacggagtttccccatctgaacgactcgcagtacgagtccgtttgtaagatggtaggcatctttgggacagatgccctgcgtagcttggcggcggcgacgccggctgagcaggttgagcgtatcaacgcgttcgacacctacgagcgagggctcatcgcccacgttcaagggctgcaggccactgcggccgcgccgaagccggtgcaaccgaagcccctgcggctgaaggttcaccccttcgaagggaaggaaggagaaaaccttcacttctgggttcgagaggttgagctcgcgatggacgcggctctcgtctcggacgagcgactccgtgtcacctttgcgctctccaaccttagtggtcgcgctaagagttgggcgtatacgcgcgaagcgacgacgcctgaatgcttcgcatcatggtcctagctgtgcgagcaactgcgggccgcgtttcttccggcgaactacgagtaccgccagcgttcgcgcttcctcgcctgcaaacaaggaaggcgcgagctgcatgagtacatccaggagatgcgagtgctcactgcctctttggtggggaaccccctgcctgaacacatcaaggtgaccgtgttcacggacggtctgcgtgtcggtcctgcccgcacgcaactgttccgtgtgcaagcaaacactatggaggaggcgattcagatcgccctccaggaggagtacagccacaagcaggctcgtaccccagtcatggtatggcagagcaaccctgcctctggcggtgcgcctaatggtaactccggcaatggagcgatcaacgggcaggttcccatggatctgggcatggccgagcagagcgacattcgctgctacggctgtggcaagcttgggcacatgaaacgtgcttgtcccgcgggaggactgaagaagaagttctcttcgaagccctttggctctagcggtcgctggcagaagccgcgccccaggaaccaggggaacgccggacaccagtaggggcggggcgccctactggggaaacactaagtcttcatgaggggcgtgcgggtggcgcacgccatggggacttagcccctgagagtctctgtactctcgaagcggagaagggcagcggtgggctgcttgtggtgcacgcgagtgtaccgggatacgatcatcccttgagaatcttgatcgactctggggcgtccaagaactttgcgcgccgccagactgtcgcacgcaatcgcgacaagtacgccgatgcgctacgaggcagcaaaggcaacgggctggtctcggtaagactggccgacggtacggtggtagaagtacctcgggtccacatggacctcactgtcaagttcgaggacttcgacagcacggagccgttcttggtcctagacatggacaagtacgacttgatccttggaatgccgtggctggagaaacacgagccttggatcgactggcgcggcaaggccatcggggccagccgtcccccacgctctgacagagctttggtgagtcatgttcccacctctggcagcagctggggcgcccgcgagggccgccagggcgcagcagcgtctaatcagttcttggggttcgtcgagactgacgacgactccgaccgggccggacaaggcctgagagtggaggtgccggacagcacctacaaggtgggtaacgtaggtccacacgcgggtaacgaagtaccgcaggcagcaagggctgctggagaaggcgccgctggcgttggcgcgggtaaccaagttccacgcgaggtcactcagaccgtaactgatgaggaaggcactgcaggcgcttccgatgtgggtaacatagttccacaggaggtcactcagaccataactgatgcgggagtcgctggaagcgctcctggtgtgggtaaccaagttccacacggcgaggtgggtaacatagttccacccagcaaggcgggtaaccaagttccgctcaagaacaaggcgggtaaccaagttccgctcaaggacaagacgggtaacgtagttccgcacgagatcgagaagatcggtggtgccgtcaaggcggcgccacgagacgaagacacccgagggtcacgtcgtaagccgggcctagtcgtgtggccgacgacgccagtcgccagcgactccgagcctccagccaaggctccagccgccgaagagtgttatcacatcttcgacggcgtgaccggtcgtcgggtcaagacaggagctgtcgagcttacagctctgctcgaggtttcagagttgctgaaccttgaggagctcgccatggaggacttcttggccgagctaaagaccggggagatcgcagagttggttctcctccgaccggagttcacgtcggccgagttgaactcgtcctcgatcatggaccaggcagtcctggaggagttccagagacagcgcgcgtcgcgcatgggctctgagattcttaagaacccccgggacccggtgtaccccttggtgaaggagttcgaggacgtggtgtccaaggatccaccgtccaatctcactccggacaggggaatcaggcacgagatcgatctcgtgccgggcacgaagtactgtgtcacgaggcaatggcctcttccccgggagcagtgtgaagtcattgatgccttctttgccgccaaggcgaaggcaggcatggtgcgggagtcgaagtccccgcactcgacgcctaccttctgtgttcgcaaaccgaacggaaagtggcgtctggttcatgcttataacaagctgaacagcgcgacagtgcctgcgcagacaccgatcccgcgcaaggacgtgttgctcaacaacatggccggctgcacgctgtatagcgcgctggacctggtggacggatactaccagatcctgatgcgcgagagcgacatcccactcacggctgtgagcacgccgagcggtatgctctgggagtggctggtcatgcctcaggggctttctaacgccccggcaacgttcaatcgcttggtcacacaactgttccgacctttgcgtgcgttcacacagacgtactttgacgacatcttcgtccacagccgtgccgaggcaggccagacggccatggaggtgcatctccagcaccttcgacgtgtgttcgaagtcatgcgggcgaacaagctgtacgccaacatcgacaagtgtgcattcgcagctgaggggatcaaggtcctgggctgcttcgtcagcagcgccggggtccgggcggacccggagaaggtgaaaaccatcgcggcttggccgccacctcggtcgcagaaggacctacgacagtggttgggcctcgccaactacctgcgcaagtatagtgcaggctacgcctagctggcacggcccttgtcggatctcctgaagaaggatgtcgcctggcgctgggagcgtcgccatcaagatgcttttaacgacatcaaagcgagcttacagcgcgcgccagtcctggcattgccggacgagacgaagcctttcagcgtagtctgtgatgcgtctgactacgtaattggctgtgcgctattgcaggccgacgatgaaggccgcgaacgggtcatctcgttccagtccaggcagctcaaggcagccgaacggaactatccagtccacgacaaggagctacttgccatgaagtacgctcttgtcaagttccaagtgcacctcctgggctcgacgccctttgtcgtttatacagaccatgcgtccttgcggactgccgtcaacacgtcgcatcgctcacagcggatggtgcgttggctgtcattcttcgcggaatacaacttccgtgtcgagtacaagccgggcaagttgaacgtgcttgccgacgcgctgtcgcgccgacccgactacgagcttgctcatattagtcgggtcacgacggatctgtatgatcgcatcaggctggggtaccgagacgatgccagtctcggacctcttgtgcggttctcggccgctggctcggaagccaaggccgagtggctcacgccccgacaacgtgcaaggctgcaccgctatgagtgggctgacggtttgctccactatagggtcgagcccgaggatcctccccgtattgtcgtgcccaacgacgtggatctcaagtacgacatcctgatggaggcgcacgacgctccatccagtggccatctcggccgtgagaagacgtacgcgtctgtctcgcagttgttttggtggcgtcacatgtacaagtgggtcgccacctacgtccgtacgtgcgagacgtgccagcgcgtgaagcctgccggtcacgcctcggcaccattgcagagcctgccggtcccagcggacggctggaagtcgatgagtctcgactttgtcttcggcctcccggccgatgcccgtggcaacaccggtgttgttgcttttgccgtctgagcaagatggtacactttgctccagttcgtgactggtgacgaggtcgctcgcctgttcatggactgtgtcttcctgcaccacggtctgcccgagaccattgtctctgatcgagacccgcggtttaccgctgcgttctggcagacgctgtttcgccttctcggcacacggcggtcgatgtcgacggcgaaccacccgcagacggatggccagacggagcgcgtcaatcgcgtgctcgaagccacgctccgcagtatctgcgcggagatgccccgctcttgagctgatcgcttgcccatggttgagttcgcagtcaacaatgcggtacatgcatcgacgggctttacacccttttacctgaacgggttgcgccaccctcaggtgccgctcacattacgaggcagtgccggggcttcggtcctaagtgggggagaggctcggaaaaccttttcctcccaagtctcggacgtgagtccagccgccttgcggaagcaactgtcctcgtttgtcgaagccaggctgaacataatcagcagagtgagagacatttaccatggcgcaagcccaagataaacagaaggagtactctgaccaaatggaagaaacatgaacgtgtttaaggttggggatttagttctcctagatactagaaacctaccgctaaacactgttagctcggtcgagagcaacaagctgaagcaccgcttcattggacccttcacggtcctcagccggcatggcgtggcgtacaccatagagttgcccaagtcgatgacgactcacccgacgttttacatgggttgtcttaagaggtaccatgaccatctggctctggctgccccgcaggaagcggtgggtggcccggtggagaagagcgcagctcctcgaagcgcggcgtcgagtcgcggtaaggcgcctgatacgcgcgctggtcgtaagacggcgcggcgtgcatcggagcagcatacgcagggggccccgtacgagccctggccaaactgggcctgatacgagtggggcttctgctgctccggatacggcgcgtggccatgaagctcggcccgaaggccagcgagctggtttcgcagcgagtcgtaagacgacaggtcggctcgacgatccacacggccatggagactgcgagtttcttgatagagcgaggcaacatcctcacggagccgctccacggcaccaggctgaccagcacgagcggcagcctcgccaccaaggccgacgcctagcgcgatctcgaggacgtacacacggtcccggagaagacgaatctcctcttgctgcagggccaccacctgactcggggccccagcatacggctgcgtcgcctcaggctcgtagccatggccgtgtgaggccaccgccggccctccttgatcgtaatgggcagatccactaccacgtggaacgagtcgtccgggagcggcggctccatggcaagcgccagctgctcgtgaagtggaggggttaccctgagtcggataactcgtgggagcccgttgagcagcgccaggcagactgcccgaagggtgttgcgatatgggacgagaagcagcggtagcttcgtaagtagtccttggcttcttggccggtacccggggcacggtagcagacgtagtcgcaccacgcccacgctcttcacgagctttggctctcgcctcttgcttcagctcgtccatcttcgagtggagcttgcgcttgctcacgagttgagcgaactcgatgcggagctcgcgcacgtccaggattgcggacagagtgcgatcctcacggagttctttgaactcttggtcggaataccctttgcgctggacgtagcgccagaagaggtcttccacctcgctcctggtcgtgttgtcattcggcttgacccagtggaaaccccacacaggatggagtccacccttgtcctccggcttcttgcgaagcgtggtgaactccttcagtgtgagcttgtgtggtgctagtagcacacaccgggcgacttcaacgtcgccaagaaagagtggctctttctcaacaagagcacgctcataggaacccctcgaggtgtacccgccgataaggccacgaggagccgagagcttctccaacagcgctggcgcaccagtgccaggctcgggcgggaagtagccctgcgggtacgtggcatccccacctgaagaagactcgatggcagtcgtggcagtcgtggcagtcggctgcctggcatacacacccgagctagcagcgtggtattgctgctgctgctcgtcgaggttgatggagagctccttgggcttgtggacggcaccctcctcgtcctcagactccgagtcgatgaacagcttggagctggagccgcgaggcgacctggaagctgaacgcttcttcgccttggcctcggcggtcttcgcagcagtagccgctttcgacgcttgggcacgctcacgaccttgtgccagcgtcagatgcttggatgccagcacctcattgggcttggagcccgcgtcgctcggcgacttctcggccacgacccaagcgtcggccatggcgacttcgtcgtgcgacggcttgctgtcgcctgagccggactcggcgtcctccgcctccttctctgacgaggcctttgcgtcggccgaggcgttagtcatgtcgcctgcctccagctccgtgccttcggcagcgtgcgtgctgccctccgagacgttctcgtcgtcgggtgaactctcaccggagtactggaccatcgtgcagtcaaagacggcggcttcccagtcgcgagccgggcttttatggccccgaggactctcctccttgccttgagcggcgtcaggagacttgctccgagccccggcctgacggccactctccggcgtgctgctacgagagcgcaccacctcctcggccgccttcgtggcctccatcagcgcggacgactcgtccttggccttggccgccctggtcttcggccctacggcccgcggtttcggaggtgctttcgcactgcgcgcactgcgctttggaggcatgcttccggtcgacgtggagaccctgcggcttgctcggcgatgcgccagttgctctgtgaggcccgggagccgaggcgccagagctcgcgccgttgtcgatggatctcgactttgcgagtgaaatgtgagtcgccggcgtaacctcgctctgattggtcgataagatcgaatctaagtgggggaggatgtaacggggttacatggaatagtgaccctgtcactattccgggatggctacatcggtcactcccctggatagtgacccaagtggcctcagagccaacagatacattttgtatgacacaaactatagggaacttaggatttgtatgcaggccaaatctgtaccaacctataaatacattcagtcttagatctaccgcttttcaagtcaagtcgtccccttcagaccagggacacgtgaacggctgttcacttggagtttgtatactcctgcttcctctgttatgaagtgctgtgtgccccgtcacaaatctactccgataacctagccccatcttagtaggtagctgttttacacgtccgatttgacaaaacaactgaaaagcacaatgtatcgtttaaaaatagagaggaaggtctgagctatttagcgctttttttccggtcacaaacgaagctgtcttcatggtgaaactcggtgtgggaaatcgtgttcaaggaaagtctaaggggacactgggcaaggagggcgttgtcctgtcgatcgacaacagcaaacgccagccgtggtacagcgttcagtggggcgatggatcagtacagtcagtgtcggcgcgttcaatacagctactacaggctcccagcagcgactcagccatgcagaacccgactacggagcctttagagtcgatgatcgctttgctgttagctggtgctggtgcggggcctggtccgggtgactcgtcttcttctgagtcggaatcctcttcagacgaggaggaagatgaagaagataacgcagatgataagtctacgatggtctctggaatttctaacgacggaaaaatacttgcccacaaccgcatctgggaattttgctccgacctccttgtcgaccctgcaactttgcaacgcaagcgcaaaactttttttcgctggccggcgacgctggagttaggagaaaagaccttcgccaaatatttttttctgatgtacccgtggtcgaccatacaaactactctacagcacacaaatgccaagttggtggagcgtaagcaacgtccaattgctgagggagatttgtttcgctttctgggagttcggcttgcgatggcagtcgagcctcgacgcggtcccttgcggacctactgggaaagagaagttggtgagggtatggttggcacagccgcaaactttggtgagcgcttctgcattacacgacacgccattgaaaatatttcagctgcgctctctttttccgatgatgtgccgtcagatgacccatggaaatctattagaccgctaatagatggatttaattcacgccgccgcgatgtagtatcacccggggagattctttgcgtggatgagtgcatgagcgcctggcagggcaaagagggtaaatactgccacgatggcatacctcacaagacaagaatcccaataaagccagaaggcgtgggtgccgaacttaaaactatcgctgatggtgattcgggtgtgctgttgcggttagatttgatggagggagccgagcgtcaacgccagaagccataccacgcgttgtttggtgagggtacagcgattgttcttcggctttctgaagtttataaaggtagcgggcgcgccgttgttgcagacagcgcttttgcttcggttaaaacccttgtgcaacttgaaaatctttgaggcctttacttgatgggaatggtcaaaacagcgtctcgcgagtatccaaaaaagtatatgacagagtggtttggtactgagcccgctcgtgggtcatttaagatgctacagagcaaaactcccaaaggcaccgcgatgtatgctctctgctgggctgaccgcaaagcgaagtgcctcatctcaaaccgcggaacgtcgcttcctggcaacgatagcgttcgccgacggcacaagctcatcctagacaacggccagctgaaaacaatacagtatgaccgacgtatccagcgcccgcaaatggtggagctctttttctcgaagttctcggtgatagatgttcatgatcatcttcgacagggtagcctcgagatggaacgaacttggcacacaatgcagtggcaacatcgtttgctcgctacggtgtttggcatggtggtggtggatgctttccgcgcctatcagtatgaagcagtcgaatcggagttcttagaaccggctattgtcgacttcaacacattcatctctcaatcaactggtattcaacgactttgtgatgcaccgctcgacgagggtcactactgctgctgatttccgtgacgacgtagcgcccccaactcacacactgtatgcattcagtacgcttccccagtacaagcgtcttagcgggacaatcttgcgtgcgcagcgcaaatgcagtatttgcgggcggaaggcctcattttactgctccgggtgctctgatccactggaaaacaatttctttggggtttgcggcctgaagacaggtcgggactgccactcactccatttaaacactacattgggctaattagtagcctctaaacgctctttctaatacatttcctcatgcattcaactaatcagcttgagcccacccgtgggatatttgccgatcccacgcgtgggcttttaagctgggtagtaaaggtaatgttttttatattatcatccctggatcagcactacattagtagaatctactaatagtagtactagggcctggtcggggaacgctcgtctcggctttcgatcgtcttagacgatgtggcgacattttttcttatttttgattggccagttattagctcgatcggctaggttcatcgtctccagactgaccaatctgagacgactaaatcaccagtctcactttggagacgagcgtcttcactgcgtttcgatggtgcagagcgaaagcatcgttgctgcagttgctgcggccacgagggctctcgcgacggcggtccacaccgctgtgtgggcaatttcgaacccgaagcagaacatccttaccctgacaccgctagagtttgaggctatgctttacgacgcggtctacgacgagtggtttcgacagaatctcaggttgacactgctggtcagtgaacactttgctctggttaacagagagtgttgatgctaagacggcccacgcatatttgatgcgcttggtgtccttcgtgttcttgaagttgtcagctaactctgcgtaacggaggcgaaagaacccgctcacatcatcatcgctccatgatgcagctggcctggtcgaagctcctcgtcctccacgaccaccgcgacctgccccgcgaccaccacggcctccaccctgcgggggtgccctctcgacgccgctcccgttggtgtccgtgccgcttacgcttctctcagcagcgtcttcagcttcagcgccgcccacaggtggagcagtaagggtgccttccatggctgcgagttctcgactgtgatggtgctgagtcgagcagcttgacacaccaaaactaagacggtctccagccaaccgaccacatcggcggcacacgctgctaccaccaaaacggtgttccccgttcagtgtgattgcagtcgaatgctgtgaagatttggtagaccagatatagccagtttttgaggttcgggttgaacttgtcaggagagggcgacaataaattaccttaccgtcggatgcactgatttttcgaaaaataagagccgccccgcgccccccgttttggatggcattcgtcgatcggccccaagagagaaagaagcaagagtgaaggtccctgcacaagaatggcgcgcacaactggcacggtacgcttacatgcgagtcatgggtaaggaatatgtgttactgacatttgcttctattagcctggctcgtcgaagcgccctccaggccccgaagacgcccatgtgacgcgtgcgcagcgcgacagtgctgagtcggagcggagtcggagtcggcagcgccagcgcgaacttcggcatgaaacggacaggacgctgcgcgatctccccccgctgccagtgtacaatcgcggtgtgctagaagcgcagcgtgccgcgaatgtggcgcgcgcacgccgcgacgagcaggagatccgactggcgatggacgggaggtacaaacgcactcggagtgctaccgccatgctgcgaagtgaagatgggaagaaggctgggcagaaagcccgggctgaagcccgcgagaagagcatgtacgagcggtgggaagcacgtgccgtgcgcgagatgttcggcatagagccagattcggattctgacgacggcgcccttgccgaagccatttccgctttggacgaggccgacgaagagctgtctcctggcggtacggacgactccgactacgaggagaagaccccgccgttcggcaccgacccagacgccagtgacgaagatgaggaagacaacgatgatgaagagcgcgaatcggccgctgaaaacgacggttaagagagcgaggatgctgacgaagaggaagaaggtgacgtcgggagtggagaccgcgcagacgaagtggacagcgaggaagacgacgaaggggacgagattcggttggtacccgaaccgaaatctcaccgaagttcgtcccgcacgtatgaccttcgcgtgaagcgagttgtgcctgtgtggttctacggattcagcaccacgttcgactcgtgggatacgttccacacctcgttcgacgacttccaggctcagacattccagcagttttccatgcaaacaagtacgtcagttttcctgcggaacaagcaaattctcgaaaaggacaaggaaaggaagcgagccgcaaagaaggcccggaaaccgatcaccttggttccggcggaatgggtgacgtactcgaaaacgctggtctgcacgcatggtcagccctacgaaccgaagggcaagggaaagcggcaccacaacaacgttcgcgacacgaagtgcaaggcgagattgaatgtgcgtgtcgctgccacgttcagcggaacttggtgtttacgcgtgaacgccaccggcaaacacaatcacgacttgaacaagcatctttgggagagctacgcggagaaccggacggtgaaggacccgcagttgacggaggatgtggcagtgctgcataaggctggggcgaacacgcacggcatcttgcaatacctgcgtgaacgtacaggtaaagtcttatcactttctgtgtgattttggtttgttcctaactatttgctgtggatatttggtggtatgttgtaggcaagaaaaccgtgcggaaggacgtccacaacatggtgcagcgatacaaactgaccgagcaagctgctcttactgatgtgcaacgcgcatttgcagtgatggaagagttttgtctgcagcacggtggcaactctgctcaaattcttgtggatagcgactccaacgttgctcgcgtcgccacgttccagtccgcaagaatgaagcgcttgttcaaagcgtttccggaggtgattctcgttgatgccacgcacgacacgaacgtgaaccgctacaagctgttcagcttcgtagtgcacgacgtgttcggaaaggtactgacgtagacaagttttttgttgtgctgtactttaatacactattctaaccttaccatagggtcaatatgtccatcatgcacttgtagacagtgagcacaaagacaatctgcgccgagtgatggagatcttcaaagcaaacaaccctgactgggccaaaatccaagtggtgatgacggacaaggctgctcatgagaaagaagttctgcgagaagagctgcccgacgctcggcaactcttgtgtcagtggcatgtgattacctggctgaaggagcaggctgcacgtctggcgtcatcggtgaagaagtcggtgaagagcctgatgcggttgatggtgtacgcaagcaacgaggacgagtatgaagatgcaaaaggagctgtgttggagttgcttggaggcgatacatcacacgagttgtaccgcacgttcatggcaaactgggacagtaaccaggacgagtgggtttcctacaagcgcggcaacacgccgcacctgacgaacaacaccaacaataggatcgagtccaagtgggggaagataaaggatgttattaacgactccttcactatcgaccaactcctgtctacgctgatgacgctgcagcactatgccgaagagcagtatctcgcagaataccatcgagttgggagccggccttcacgggattcggaggaccgcgaactgacgctgctggctttgcaggtgagcccgtttgccttcgaattggtcgccaaacagcacaccttggcaaccggtccgaacgcagactacacggttgagctgaacacaccaggacgagccactgtcacgagcccaaggtctggagaagtgcatgaagtcaacacgagggtaagctattcaagttatggtatacttttggtctattcagttatctttggtattgacgactgacatgtaatctgtgctgtacagacgaactcctgcaactgtatcttcatgaagacctgcttgctgccctgccgcgacgtgatgtacgtccggagcacgtccaacttcgaaacagtactgcccccgatgcactgttttcctacacgatggattgtgtagagtccagaaaacaacatcgactggggaggaattccgtgtggagggttgaagcaagggagctgtccgtctcgagcgaagaagcgagctttgtcgggggctgcgatgtacatcgaagccaaggcaacaacggagaagatcattgcaagaatggcacttcaatctacacccacatttcggatcgcgctgaagtggcttcaggatttctacgaagcgctcaactccgacgacgtggttgcctttgcagagcgcgaggctccggtattcacggggctttctctagtgacctccagagcaaaggaaaccaccaaggttgaagatactggcggaatcgaaagaagtgaggaggagtcctgcagcactgctgttgaagtcgatgtggccgctgatggagaaactcaaacgggtgcggaagcagaggaagatggcaacgctacaccctccgacccaaccttacaagattctaccgaacccacacaagtctccaccgaatcgagaaagccgtcagaagaacgcccgaaggcagtcacgtggacgtttgcggagcgtccagtgatcaatggaacgaccaaggctcagcgaaagcgtgcccaagctaaacaagaccgtgaagctgcattggaactggcagctaagtaccgccagcgaaaagcgggaaaattggtctcattcaatgatgttgccgctttgcttgacggaccctacagtctattccactcaaagcctatggttgacgcgcttgtactgccccaagttgatgttaccgggccgctgtccgtccgagccttcaagatcgaccaagacattccgtttatcaagggtatccctccgctacccattgtgacggaggctattgacgctatcaagataaggcaggacatcgaccttcttgcctactggccagactacggctacgctacatttgatcagctggacgctatggcaagcatcctggaggcgcgtcagcgattcgcgttggtgatgcgcactacaaagtggattgacgaggtggagtggcgtgttgcaaaccttcgcgagccgttcacggacacgagggcaaccacaaaggtaagaaacaattcacagcatttgaattgaagatgcaccaaaactaacaaagtatcttgtgtattgcagaacgagcacaaggcttacgtcgaaacgctcaatctgagcgtaaatcgcgtgcccggtgaatgtgtgaacggacaccaactgctggacttccgtgagaatctgtggctgcataccacgtccatcttggtgtcgctgatggctttgcgcgacgcttacccggacgtcgtaggcatcatcagccccagctatcacgactttgcgttgccggagcaaaaacgcaggaccgcggcaggattcggggccagcgaccctaagaacaagcgtgtcattggaatcattcacatcgagcggcactgggtggcgtttttaatcgacaggacggtcgccaagggcacgaagacggcgacatgctttatgttcgaccctctacaaagtcgaagcaactacaccgtcattgaacaaagcgtgcggaccgtgattgaaggggtgcttcagctacgtggcatggtgaactacgagaaggtggagtggtgcactcagcaggacaacagttcttgtggcgtgtggtgcatcgcagttctggagatgctgctttgcgacgcttcgtgggacgactgcatctacaagttgctgccgtacctgcggctgcgttatctgcagaaagctcttgctttcctgggcaaagaggcagcttgggaggggtgagagggtgacttcaacttcaatatacatatcatttgatttcggtattaattttggtgtaaccgaaaatattgtaccaaaattaatttcaaccatcacgaaaatccgctaagtcccacgattcccaaatctagaatcgttccgaaaagactgaatctcaatggtgtattttgcatacacaaaaacgaagataaaatagttttcccctagttaatgggtaacatttcgacacgtgtttttgaggaacagcggcacaccctaaatggtcaaataatggccgtctaaattcggtggtagcagcatcgtccccacatcggctcggttcaccttaggggtaggcttaccggagacgagcgagactgagacgatcattccccgaccaagaccaagcccttggtcaagcccttggtcaagcccttagacgagcgagactgagacgatcattccccgaccaagaccnnnnnnnnnnnnnnnnnnnnnnnnnnnnnnnnnnnnnnnnnnnnnnnnnnnnnnnnnnnnnnnnnnnnnnnnnnnnnnnnnnnnnnnnnnnnnnnnnnnngtgggccgtcttagcatcaacactctctgttaaccagagcaaagtgttcactgaccagcagtgtcaacctgagattctgtcgaaaccactcgtcgtagaccgcgtcgtaaagcatagcctcaaactctagcggtgtcagggtaaggatgttctgcttcgggttcgaaattgcccacacagcggtgtggaccgccgtcgcgagagccctcgtggccgcagcaactgcagcaacgatgctttcgctctgcaccatcgaaacgcagtgaagacgctcgtctccaaagtgagactggtgatttagtcgtctcagattggtcagtctggagacgatgaacctagccgatcgagctaataactggccaatcaaaaataagaaaaaatgtcgccacatcgtctaagacgatcgaaagccgagacgtagagacgtaatggctccaatcccagatctaacttatagtagtacatcagtagtaattttagtagtagtgatatacctactaactactattatattctggggactactaccgagcaaacgaagcctcgcgcccaagaggcatcactagcgatggcgcgcgacgacgaggaggacgaggcgcaggtgcaggcgctggcgcagctgcaggagctgaagcgcctgagcgaggcgcgccaggcgctgcgggcggccaactgcgcggagggcgtggcggccgcgcgcgcgcagctggcgagcctcaagctcaagtcggacatcaagcggtcgtccgccttcgtcaagaagctgcgcgtgctgtcggagagcaacgcggactcgctgctgcgcgacgcggccgagctgaacctcacgcgctacgtgagcgagtgcgtggccgcgctggccgacgcgccgctcaaggcggcggacctggcggccgccgtcaaggtggcgtcgctgctgcaccagcgctacgaggagttcgcgcccggcatggagcgcgcgctcatcggaagcttcgaggcctcgtacgcctcggacgacaagagcaagatgctgcggcgccgcctgatcctgcgcctgctgtgcgagctgtacctggccggcgtgctggacgacgtgcaggtcatcgcgcacatcatccagcgcgtcgcgcggcgcgagcagcccggggccggcaagagggggtccaagggcaacatgtccatgggctcctcctcttcctccggctcgcagcagctggaggtgccgctgctcgtgagcttcgccaagtcggtgggcgtcgacttcctcggcgtgcagcccaagaagtacaaggagatggagaagcagctggccgacaacgacgacttctgtgccttcgtgaccggccaggcgcccgtggtgcccaaggccgtgcagcagcagtgtctggcctgctacctggaggcgtacgagatgatctgcaagttctacttggcgcagcacgcgacgttcctcaagctggacacgcgcaacgagaaggaggaggtcaaccgcggagaagtgacggaggagcacgtgcaggagctcaagaacgccaagctgctgttcgagaagctgcagacgagcgtcaactcgctggccgacgcgctggaccgcgaggtgccgccgctgcccgtcgaggagaaggacgacggatcgggccgtggtggaattctcgtctgggaaggaggagagggcggcgggcgcgagctcagtcgcgacggccctttcgatgatgaagccacgcgctcattttacgaggatcttccggatctgctggagttggtgcctgctgttgtgcttggcctcacggaggctgatgtggcggagctcaaaaagaagaaggaggctacggctaacgcggacgaagaagctgaagcggagattgaggacgaagctgagggcaatgtcgacgatgacgggaaagacgggggagacgccgacgacgtgactctggaagatatcgaggcagatgcagcgaaggactctactgcgactgatacagacgaggaggagggcaagggcaaggaggacacggaggatgcgagcgccagtgcctcgacaacttcttcgagtgctgcaaccaacagctaccaccaccaactggacgcgttctttacttccctggaggacctggtgaaccgtgatcgctgtgacaaggcggcagtggagttttgctaccgcaactcaaaggcgacacgaaaccgcctcgtgaagacgctgtatgcggtgccgcggactcacttggagctgctatctcattatgcacgcttggttgccacgttgcagagcgtgctgaaggaggatatcggtggagaactcgtgggtatgctcgtgggcgagtttcacggcctgatcaaaaggcgcaaccagttccgacttgagtccaagatcaagaacatccgtttcctggcggagctagtcaagttccgtatctgcccgccgaacacaggcttccggtgcctccagaagtgcttccaggacttccagggacacaacgtgcacgtggcaacgacgttcctcgagaactgtggtcgcttcctgtactgctcgaagcacacccatgtccgcacggtcaactgcttgaacgtcatgatgaagctcaaggcggccaagcacttggacccgcagctggagaccctcgtggaaaacgcgtactacatgtgcaagcctcccgagcgtgtggagcggcaggtgaagcagtacgacccgatgtacttgttcctgattaaggtgctgtaccaggacctcaacggatcgaacgtcaacaaggccgtaaagacccttcgccggcttccgtggcaggaaagctccacttgtgctatggtgctcaaggcgctgctgaaggtgacgaagggcaaggtgatgcaaatgaagtggatctgcgaggtggtaaagggattgtcgcgataccacgatgaagtgctggttctgctggtggacgatgtgctggagcatatccgatacggcttggaggtcaacgactatcgcgaccaccaacgcagtctgggctacgttaaactcctgggagagctttacaattgcggtctggtgagcatgaacgtggtggtggagaccctttacctcctgatcaatcactcgcacgacttgctcacgctaccgcaatacagcagcgacaaaattccccctgctcaaatgttggagatgaaaaaaatgttcttgctcgtgcccgacatgcgctacgaccctcgcgtgcccagtgaagtggacggtccgactgaagttttccgtgttcgtcttgtgagcgccttgattgagacctgcaacggcagcgggatctccagcataactggaaacagcggcaattccaacgaacgaggcatctcgaggcctcgtctcggtcgtttcatgactttcttccagcgctacctcttctccaagacggaggtgcccatggaaacggactttgtggtgttcgacctgttcgagatgctgtccaacagtttgaaggaccacttcaagaagttcgaaacgtgggaggaggttgaccaggctgtccgggagattctacgtggtgacttggaggaggctgagcgtcgtctgtcgaagaagaatgcggctctagtcatggctacgaacggtctcgaaagcgtcgcggaggaagggtctctgtcccaaccggctgacgaagatgacgagttccttgaagacgaggaggacgacacggatgacgacgatgatgatgacgacgacgatgaacaagacgatgacgatcacgctggaggcgacgacggcgacgaggatgacgaggatgatgacgatgaggacgacgatgaagatgacgatgacgacgacgaggaagacgaagacgaggaggaggagcaccttattattcacgaccgcattcagaagagcgaggaggacgaggagttcgagaaggccttcaagtcgatgatgcacgggagcaccgacacccgcaagcccgcggcgcgcgtcaatgtggacaagatggcgattcctaccgttgtgaagagctccgcttcgctcacgcccgcgggcccgcgtggaatgctggcgcttgatgccaacgggtcccccgacggcgtggtgttccgcatgctgcggcgcggcaacaagggcaaggtggaggcccgtcaattggtggtgcccgaggcgtcgtctctggcccagcacagccatcgccaggagaacgctggaaagaaggagcagtcggagctgaagcgtctcgtgctccagaacatggagcgtgatgactttatgaatgacggacctcccatggacggcatgccaagcttcggccctcctcctccgcgccccaatgtcaactacgggaaccagacgggcggacagcaggcgggtgaggtccgcatgggattcggaggcggcagtgagtggaacaacgcggagttcgggctgcgtcggggcaaagggtatcgtgggacgaagtaggcctcgtatcgtgggagcagttgggtggcgattggcagagcggaccccggcttttgactcgtgtcgggtgagaatgatacgttcgtcttcggaactcccaaagcgagaggagttggcacagatcactgcgtgaagcgcgagcgctggggacgccactgcaatggaagctgccactttaggtaactgacctttatgatgagccgtgaagtcgagggactgtaagatggtagcgtcagcaagcgcaagcatgaggtgaagaggccctcatcagctctgcagtggcaagtcgacggagttatgaggacttagctagaaagcagtgacattcggagcgtagagctcttggagcgagggctagtgtatcgatggcttgatgtgcccgacctccctccctacctcagttgaaataccccttctggctccgatgggagcggtgacagctctcgtttgccggtgtagttggcttcttgtgtgttgtgttggctatagtagacgcggcgaggcacgcggcactgtacttgtgatgctgttcccgcccatcattttgctgttcgaactcgatcggcggtttgcagtgccaccaaagtcatgaaaccgagacacaaaggcagagaagtcggtttgcagtgccaccaaagtcatgaaaccgagacacaaaggcagagaagtcataacacaaaatggcccgagggctctcttattaacagcggtagcggtacgaagcgaatcgtttgctctcagtcctccctgcacttagcacgcggtgggggtagcggcagtggtggcagcgggcgtgacggcgggggtcgactcctgcgcgggcgtgtcctgctgggcgggcgagtccgcggcgggggcagccgtggtggaagcgggggtctcagcagcgggggcggtcgtggcggccggggccggggcggccgtggtggcggcgggggcctccgtggcgggcgaggacgcggacgtgcaaccgggctcgaagttgtcggccaggctcttgacgttcatgacggcgccgctcgtggggatcgacaggtcgcagtcgggcgggttggtggcctgcacgttcttgatgagctcgtggcacgcgtccaccttgcacatggcggcggtctgctcggccgtcggcagcgacgtggcgtacagcatgttgtagcccgagtccgtggcgcacgtgttgagcgccgtgccctgcaggaggcccaccatggacgtgtaggccgaggcctgctgcgtggccgagcaggcctcaccgttgacggaggcgacgaaggccagggcggcggcggcgacggcgaagtgcgagttcatcttgagtgtggtggggtagggaggtggggtgagctgcggaaggcgagttgcagaatgaatcagtggaggcggcccgcattgtacagtaggtgaacttgccgggccccgtgcgttcgaacagcgcaagggcgcggtacagcatcaatctgggccggcctgagcctgcggctggacaagagccgctacgtcccatgttgactcaagtgtccatagtgccaacctgctgcaagtcctgcctggcgtatctgagccaaaagtgggtgtcatgggacctggttgtggccgtgtcttcacctttatcgcgccattgaaccggtaatttcgcggctttgccagtgttgcaggtgtgaaaaagatgtactgtatccttgcgcccggactctcgtgaagtactgtcaacgagtccgcgagagcccgggcgggtgtatcctcttgcaactgtcccatagcggatcccggcggcgtctgcaggtgagtaacaagccttgcgtcaatgggccaacgcgcaggtgaagcctccgactcgaagttccagcagttgactgctgctgcagtcgtggcgatatcccgccaaacttcacgaagcgcccctgactgcactgtagactgtatccgatactgtactgtacagtgcatcgttgctattgttgcactgagagtttagagccaaatttgctttacactcggctccctacacgatgctatgccattgtgacgcacctcgatgaagacgcagagagcgtggatacattcatcagccttcgcttgttgcgagagttttgcactggggcagggttcatgatcccacatggactccatgatagaggggtatcggatacacttcaacactacagttttgaatggcaggtctgcttgacgaagcccacaaaagcaacaatacataatggcaatgagggataacgcaataatgagatgctattcaccaataccaaatctgcatcgtccttatactgaaaacgaagctcttggtcgcaacaacttagcaggccgtggcagtctgggtcactgacgtcgtcgagttcgacgcctccgtcgtgggcgtggtagcggccggggtggcggcgggggcctccgtcgcagcggacaccgtggcgctctccgtcgtggcgctctccgtggcgggggcagccgtcgtggcgggggcagccgtcgtggcggccggagcctccgtcgtcgtggccgtagcggcgctcgaggcagtcgaggtcgtcgacgtcgacgtagaggacagcgacgagcacttggtcgagaagccgctcgtcaggtccaccacgttgagcaccagcccgctcgtcggcaccgtcaggtcgcagtcaggcgggttcaaggcagccaccgactcgatcagcgacttgcagttgtccgacgcgcacatcttctcgtactgcgcgtcgtccggcagcgacgtcgagtacagcaggctgaagccagactcgtccgcgcagccctggaacgagctcagcgtcagcacgctcgccagcgacgagtacgcgctggtctggtcggtcgacgagcacgtctcggcgacggcggagcccacgaaggcggcggcggcaacggcgaggaaggtcttcgtgttcatggtacctgcgttggctgaagaaagctgtgtgtctggaacagagcaagttgtggaatgagctttcgcgtcgatggtatccctgcgaaccggcagatgcaccctactgtactgtacgggagcccagccttggtgtcggaagagcattcgaacaggaaggatatgttgggagtcatggtgatcggtgccatcatctccgtgacgcgatagaagaagcctttgcagtcaaaaaagctgcgatcatccttgggtgagtgtgacctgttttccttgatattcattgatcctgggcacgcccggatacactggtcgagcagagcattatacttctgacaagatagtttttatcgggatgccaatgcttgacctgccgttctcgatgcaggatagtcgaagagttgctgagggatatgaaacgcatcttaggtggtctcgacagtgcaaagcgcgacgctggtcaagcagaaacgaagagctgaggatttcaccaggcaactgcatcgccgccacgaggatcccttcaagatcatgtcccagcgcagtttcgctcatcgagactcacagtttgaatcgattccagttcgttctcgaactcaaagcgcaatgccaacaaccaccgtggtgcaaaaaccattgcagactgtaaccccttgaggggcttagaaggttggtggtgaactccagcaccatgattccttcacagtgcagcggtcaacagcatcaaacttagttgatcggcttgcgcttcggatcgaaaggcaggtcttgagccgttcagctgcgacttgtatggcttctgatctgctgcgtcccttttgcccagtttcgtcggcgatggcttccgctctgcccaaaataccaagttgaagtgactagccaatcccatcacttgtatatcccaaactacactagattaggtcgtccaaacagactagtttgggcagtgtatccgctcgggtcgtgtgtcacggctgttcgtcccacctcctgacagatgtgcaacaccagtcgtcccccaaaagatacgcttcagctttgaacctggttcagacctgccgccatcagggacagcccgccatcgcctgccctcctgacgcccggccagttacacgcgctcgccccccccccagtgggcccccacccgagcaaatttaccgtccgagggcgactgaagactgaagctgcccctttcggacaccaagcaggtcaaacgcggcagctgcacggcatctcttcattccacaacttgctctgttccagacacacagctttcttcagccaacgcaggtaccatgaacacgaagaccttcctcgccgttgccgccgccgccttcgtgggctccgccgtcgccgagacgtgctcgtcgaccgaccagaccagcgcgtactcgtcgctggcgagcgtgctgacgctgagctcgttccagggctgcgcggacgagtctggcttcagcctgctgtactcgacgtcgctgccggacgacgcgcagtacgagaagatgtgcgcgtcggacaactgcaagtcgctgatcgagtcggtggctgccttgaacccgcctgactgcgacctgacggtgccgacgagcgggctggtgctcaacgtggtggacctgacgagcggcttctcgaccaagtgctcgtcgctgtcctctacgtcgacgtcgacgacctcgactgcctcgagcgccgctacggccacgacgacggaggctccggccgccacgacggctgcccccgccacggagagcgccacgacggagagcgccacggtgtccgctgcgacggaggcccccgccgccaccccggccgctaccacgcccacgacggaggcgtcgaactcgacgacgtcagtgacccagactgccacggcctgctaagttgtaggtttgcgcggctgggctgtccacgtatatatcattctgggagtcgagtctcgattgccctgtaataaaccttttcgatatcataggttgggttgctgctttgtttcttcttggattttgagtgcgaataaccttagctggatgattcgctttcacgtggcggagggccactgctacagaacggggcgttcatgggaaagagatgcagtatgttgtaaagagacagacctacataccaattgtcggatagacaaccccgaatgctaccataggccaattctgtcttgctggatgcagatgcgccgatgtgttattgacttcaacacgtgatgttgaagcggtttggtttgtcacggctgttgaagttgcgtctagccccaactacgatgtgggcctacactgtaccattgtttgggaagcgaactgtacagtagtcgtgaatttcgccccgcagatgcagacaaccagtcaacacactaaatacaatacaacagatagatcaaaccaccgcccttcaaaacaaagtgatcactccaatgaaaacgatgtattatggaccgtaatttacggtcttggcactaccaactacgacagcgctgatccaaagtccagtcttcagctgccgagccaccaggcttcgcagcacacaaatataaaggtcggttgtgtcacaagatacgggggtaaaccccgtccgcttagcaggccgtggccgtcgaggtggtcgaggtggtcgtggcggtggccgtctccgtcgagttcgacgaagtggtcgtggcgtcgctggcggtcgacgcagccgttgaggtcgcggccgacgtggtggaagccgtcgtagtcgtcgcggcggtcgaggtcgaggtcgtgtcagcgctggtgctggcagcggtggacgtcgtcgacgtggaggtggttgaagtcgtgctggtgctggccgacgagtcgctgtcgagcgacgagcaaatgctcgagaagccgttcgccagctcgtagacgttcacctccaggccgctcgcggggacctccagggtgcagtcgggcggcttgagcgcaatgatggactcgatgagcgactggcagtcgctggacgcgcacatcttgacgtactcagcgtccgtgggcagcgacgtggagtacaggagactgtagccagagtcgtcgacacagccctggaacgagtcgagcgtcagcaggctggccagcgtcgtgtaggcggaggtctgctgcgaggacgagcaggcgtcggagctggacgagctggaggcggcggctgagcccacgagtgccatggcggcgacggcgaggatggtctgcgcgttcatggttatctagtagctgtaggctaggatattgaggaatgaggattgtaggccagtgctatgttagattggttacgtgcgaagctttcacatctcgccaggactacttccggcggaagcgcatgaaggagagtatttgaggaggggtctgatccagtttgcgctcgagtggagtgaaactggtctttattgaaaacttgctgcgacttcctgggcaccatttccatttccagtgttttagcctccgagcaaatcttcggttccctatgaatgaagatgctgattgcgggctaagcttacaccacggcgtagtaatgaatgaaacactagtacagcaatgcgttgctgtacgatgaaaacatgtttagagttaggacaaccgctccccgagagcgactcctgacggcaagatatgcccaagctttcgtctgctcaatgtaggcgcgagtctggctgcgctcgcacgtcctgatatatagcgcccgcggcagaactgccctgggacatggtctaaggctccattacccgttcatgaccgagcatttgggcacccagacgcactcccgcactatcggggtatcgggtacgtaggattcactcttcaatccgatgtcaaactccatcggcctgagtgaggccgatacaaccccaggagatctctatggtgattgctatagcaacaatctccttggccgtccagggacccttccgcaggccgcaaagcagctttcgtaacttcatcccatcgagttcattcctcaattttctccgctctacgcagacgacaccagcctacagctactagataaccatgaacgcgcagaccatcctcgccgtcgccgccatggcactcgtgggctcagccgccgcctccagctcgtccagctccgacgcctgctcgtcctcgcagcagacctccgcctacacgacgctggccagcctgctgacgctcgactcgttccagggctgtgtcgacgactctggctacagtctcctgtactccacgtcgctgcccacggacgctgagtacgtcaagatgtgcgcgtccagcgactgccagtcgctcatcgagtccatcattgcgctcaagccgcccgactgcaccctggaggtccccgcgagcggcctggaggtgaacgtctacgagctggcgaacggcttctcgagcatttgctcgtcgctcgacagcgactcgtcggccagcaccagcacgacttcaaccacctccacgtcgacgacgtccaccgctgccagcaccagcgctgacacgacctcgacctcgaccgccgcgacgactacgacggcttccaccacgtcggccgcgacctcaacggctgcgtcgaccgccagcgacgccacgaccacttcgtcgaactcgacggagacggccaccgccacgaccacctcgaccacctcgacggccacggcctgctaagcggacggggtttacccccgtatcttgtgacacaaccgacctttatatttgtgtgctgcgaagcctggtggctcggcagcttgaagactggactttggatcagcgctgtcgtagttggtagtgccaagaccgtaaattacggtccataatacatcgttttcattggagtgatcactttgttttgaagggcggtggtttgatctatctgttgtattgtatttagtgtgttgactggttgtctgcatctgcggggcgaaattcacgactactgtacagttcgcttcccaaacaatggtacagtgtaggcccacatcgtagttggggctagacgcaacttcaacagccgtgacaaaccaaaccgcttcaacatcacgtgttgaagtcaataacacatcggcgcatctgcatccagcaagacagaattggcctatggtagcattcggggttgtctatccgacaattggtatgtaggtctgtctctttacaacatactgcatctctttcccatgaacgccccgttctgtagcagtggccctccgccacgtgaaagcgaatcatccagctaaggttattcgcactcaaaatccaagaagaaacaaagcagcaacccaacctatgatatcgaaaaggtttattacagggcaatcgagactcgactcccagaatgatatatacgtggacagcccagccgcgcaaacctacaacttagcaggccgtggcagtctgggtcactgacgtcgtcgagttcgacgcctccgtcgtgggcgtggtagcggccggggtggcggcgggggcctccgtcgcagcggacaccgtggcgctctccgtcgtggcgctctccgtggcgggggcagccgtcgtggcgggggcagccgtcgtggcggccggagcctccgtcgtcgtggccgtagcggcgctcgaggcagtcgaggtcgtcgacgtcgacgtagaggacagcgacgagcacttggtcgagaagccgctcgtcaggtccaccacgttgagcaccagcccgctcgtcggcaccgtcaggtcgcagtcaggcgggttcaaggcagccaccgactcgatcagcgacttgcagttgtccgacgcgcacatcttctcgtactgcgcgtcgtccggcagcgacgtcgagtacagcaggctgaagccagactcgtccgcgcagccctggaacgagctcagcgtcagcacgctcgccagcgacgagtacgcgctggtctggtcggtcgacgagcacgtctcggcgacggcggagcccacgaaggcggcggcggcaacggcgaggaaggtcttcgtgttcatggtacctgcgttggctgaagaaagctgtgtgtctggaacagagcaagttgtggaatgaagagatgccgtgcagctgccgcgtttgacctgcttggtgtccgaaaggggcagcttcagtcttcagtcgccctcggacggtaaatttgctcgggtgggggcccactggggggggggcgagcgcgtgtaactggccgggcgtcaggagggcaggcgatggcgggctgtccctgatggcggcaggtctgaaccaggttcaaagctgaagcgtatcttttgggggacgactggtgttgcacatctgtcaggaggtgggacgaacagccgtgacacacgacccgagcggatacactgcccaaactagtctgtttggacgacctaatctagtgtagtttgggatatacaagtgatgggattggctagtcacttcaacttggtattttgggcagagcggaagccattgccgacgaaactgggcaaaagggacgctgaagaaatggacacgagatcagatcagatgctcattgtgcagaccacaccttctacgagccctggggagagccgggctcctgggctcttgggttcaataggttaagtgaaaggagacctccagaactgtgagccctcgttaagggctccccctcacctgtgttaaatatctcgctgatgattggccgtcattgaagtatctccaggttctaacctgaaaaggcataggaaagagggcttctccttgaggggaaggaaggactatcagcgacgctggggtggcctcggagcggctgtacacatatgagcggcgcgagatcttctagtgtggcgatctttgagctcgatcttctgcatcgatcacgcgaagttgctcgccttaagtctaggtaaaattgaccaatcagatattactatgaagagcccgtcatagatttgaagctaaatttggggagccctggtggggagccaatggggagccccaaccagggctccttgatctcgtacttaccatgagggagcccattttgtgcgacttttggctctcgttttagggggagcccacttttgaagtagacggtcgggctcgtagaaggtgtggtgcagacactgccgagtacaggtactggtgtgtgtgacacataaagtgtgtacggtacatgtactccggtattataacttaccggtacattactcttccgtctctgtgcactcctccagagcatgaatcgactgaaggcagactggaaaatgtctggaggctccgcacttgcatctgtagcacattgtttcgtggcaactttgaatttgaatttgaattgattgctgtttagacggctatctgctcccgatactgctcaactctacagcctcgccaatagcaataataggctgccctgggcacgcttaagtttacgctttctggatgagaatcacatggtgatattgtagtgcatgtaagtcgcagcagagcactagcgccaagagccgcctcattctaccaaagtacctactcaagcaatttgccatactgcgtcattgctgcggtcttgcatttgtacgtcgtgtttctcgagtggtggcaacctgcggctgacatcgagcgggcgcttgagtggacaccgatctctctccaaagtgatgatggcgatgaaacaactgggcaactgggcgtagacgaatgaattcgagcgtgtcttcgccatttactagactctttcaaggaataaaacgccgacatgaataccagggtgggctgtggattgtgctggacgtgaagtgggtttgcgcgtcgttcctcattcgagcgttcacttcttggccttgcgcttcgagccgttgctccggtccttgagggcacagatctcacgcaaaataggccccatcgcgctggcgacggaccacatgctcttgctcttgccgttgttcggtctggccacgcgaacttttctcccaggcacaagggggaatcgctggagcgtttgcgactcgacgtactggaggcatgcagccaagcccacgcgctgggcgatggtgacgaggtcctgtacgggctccacgtaccaccagcccttgtgcggcttcgagcgttgatccagttggacgaaaaacttggcgccaagctcttggtagatgctcctcatcacagtctggaaggccttgcgcgctgccgcttgacgcgtcttccttgcggaatggcgacgtcgatcgctcaggtaccaccagcggcgcccagaatgggcgctcccagactgcgcgagcgtgcttcgcccagaactccttgaacgctgcagctaacttggaccgcttcacgggcaagggcaacgtgtctgggtcggaagacttggttccaaggctcctgctcctcgatgcgatcgagcacctccatggtgcagatgttcagatcttccaccgacggcggcattgctgcgactgaagccaactcggcgagtgtcgtgatctcatcgtcgtcttcctcctcgttctcctccgagtcactgcagggatctaattggtgttcttgttccagtctctcttgaagtgaagtcccggtctgcagctgcatctccgacgctggagcgaactgtgactgcattgacctcgcttggagagcctgaatgtccacggggatgacgctgacgacctcgttgccgcgactcacgaacgcacgcaccagagcgtcgtctccgttgcagaactcgaggaacatgtcccgcagccagaaaatgttcttggtggccacgcgcgccgacaggtagcggaagacgcagagctggaactgctgtgcgtcggaattctccttgatctgctgagccagcaggcgagccgcttcctctcggtagacgcgactcgtcctctccatggacatcaccgtcacgatactcgctccgagacggataaagtcctgcagcgtgtgctcgttgccgacgcagaagtcgctgaacatgcgacgcagcagaagcaggttcgacgtgtgcaggcggttctcgaggaagtcgcagaagagcagcagcgtcaagagcgacggcatctcgatctctcttgtaccgtgctcgtgccaagggaaagctgctggcagaaaatcttttcgactaatggcgcaacttattggtaaagaattttgcatcatcgaaaatttgccacacagtactacacattgcaacagccaccacagcacctctttacaacacaagtcattgatgatacaatgacgcttaagcgaaggccgggactagagcaacgatcccccttggcacaggacgatgttgtcgttgtcggatttcaagagcggacttgttgagttgcgtcggccgacccttcctgctacataccgcaaagtgagacgctcagattgtagccgacgcagacaccaggccgcacaaatgatatatctagtaggttgctctctggttgacaccatcagaggactgaatggactcacgaacgcaaccataaagtcacaactccatcgccgtaactgcagtaaagaaaccaggttgaagcggaaactgagcgctcagatcggactccctttgataacaacttagtactatactcctcctccaaggcctcgactgctgcgcattgatgtccttgtccaacgcgacctcgcttcattgccctcagcactactgctccaagcggcagcaatcctcctcgtatgggcgacgctcgcccagccatcgctcctgcaagctcttcaaccttgctgaccaatcagcggagttgcccaaattgcccaaaactagcttaatttgggcttgttagctgtatccgcccagagtgtgtaatgtcccttctgaccaatgtgcaacaccagtcgtcctccaaagatccgcttcagcttcagctctgacaccaaaaactggttcgcagtgatcggacctcggtgcaaggctggctcagcatcaggtcgtggccctacagtgtctgtagacttcagcctgcctcccaggctcccagtcagctgcagcgaccaagtgtgcgcccttttcggacaggtaggccacctcttcattccacaacttgctctgttccagacacacagctttcttcagccaacgcaggtaccatgaacacgaagaccttcctcgccgttgccgccgccgccttcgtgggctccgccgtcgccgagacgtgctcgtcgaccgaccagaccagcgcgtactcgtcgctggcgagcgtgctgacgctgagctcgttccagggctgcgcggacgagtctggcttcagcctgctgtactcgacgtcgctgccggacgacgcgcagtacgagaagatgtgcgcgtcggacaactgcaagtcgctgatcgagtcggtggctgccttgaacccgcctgactgcgacctgacggtgccgacgagcgggctggtgctcaacgtggtggacctgacgagcggcttctcgaccaagtgctcgtcgctgtcctctacgtcgacgtcgacgacctcgactgcctcgagcgccgctacggccacgacgacggaggctccggccgccacgacggctgcccccgccacggagagcgccacgacggagagcgccacggtgtccgctgcgacggaggcccccgccgccaccccggccgctaccacgcccacgacggaggcgtcgaactcgacgacgtcagtgacccagactgccacggcctgctaagttgtaggtttgcgcggctgggctgtccacgtatatatcattctgggagtcgagtctcgattgccctgtaataaaccttttcgatatcataggttgggttgctgctttgtttcttcttgttgtttcattgtgtgtgttgatcatggcttgggtggtgtaatccgagtctgtagcggtcgtgagtgcttggtgtagtccatgggagaatctcgactgcggttgtttgtaggtcgaatgattgtggctgcctctgttggtagttgttgtacctttagttttcaaagcggagacggtaggagttccaacctcgggtacttcaatctgctaagtcggaaacaattgcatggcggtcgtgctaatgtaacggtcgatggcatcagatacgggggcgaatgcatccgattagccttcggttcaacaggtttaatcgttgtctaggttttgtgtttgaattgaggtacattgttgccacttagttcttgctaacgactacaacgaccggtcccacagatgctaagttaggatctgcggcattgctaacctgtcatctgcaggttgaggcttcttcgttgcgtatcgcctcggtcgcatcgtccgcaatcggtatccgcatcaggctcttcagcccctccagtaaaatatgctgcgttcgagtttggtaaggcatctgcgagcggcacaaccgccatgcaattgtttccgacttagcagattgaagtacccgaggttggaactcctaccgtctccgctttgaaaactaaaggtacaacaactaccaacagaggcagccacaatcattcgacctacaaacaaccgcagtcgagattctcccatggactacaccaagcactcacgaccgctacagactcggattacaccacccaagccatgatcaacacacacaatgaaacaacaagaagaaacaaagcagcaacccaacctatgatatcgaaaaggtttattacagggcaatcgagactcgactcccagaatgatatatacgtggacagcccagccgcgcaaacctacaacttagcaggccgtggcagtctgggtcactgacgtcgtcgagttcgacgcctccgtcgtgggcgtggtagcggccggggtggcggcgggggcctccgtcgcagcggacaccgtggcgctctccgtcgtggcgctctccgtggcgggggcagccgtcgtggcggccggagcctccgtcgtcgtggccgtagcggcgctcgaggcagtcgaggtcgtcgacgtcgacgtagaggacagcgacgagcacttggtcgagaagccgctcgtcaggtccaccacgttgagcaccagcccgctcgtcggcaccgtcaggtcgcagtcaggcgggttcaaggcagccaccgactcgatcagcgacttgcagttgtccgacgcgcacatcttctcgtactgcgcgtcgtccggcagcgacgtcgagtacagcaggctgaagccagactcgtccgcgcagccctggaacgagctcagcgtcagcacgctcgccagcgacgagtacgcgctggtctggtcggtcgacgagcacgtctcggcgacggcggagcccacgaaggcggcggcggcaacggcgaggaaggtcttcgtgttcatggtacctgcgttggctgaagaaagctgtgtgtctggaacagagcaagttgtggaatgaagaggtggcctacctgtccgaaaagggcgcacacttggtcgctgcagctgactgggagcctgggaggcaggctgaagtctacagacactgtagggccacgacctgatgctgagccagccttgcaccgaggtccgatcactgcgaaccagtttttggtgtcagagctgaagctgaagcggatctttggaggacgactggtgttgcacattggtcagaagggacattacacactctgggcggatacagctaacaagcccaaattaagctagttttgggcaatttgggcaactccgctgattggtcagcaaggttgaagagcttgcaggagcgatggctgggcgagcgtcgcccatacgaggaggattgctgccgcttggagcagtagtgctgagggcaatgaagcgaggtcgcgttggacaaggacatcaatgcgcagcagtcgaggccttggaggaggagtatagtactaagttgttatcaaagggagtccgatctgagcgctcagtttccgcttcaacctggtttctttactgcagttacggcgatggagttgtgactttatggttgcgttcgtgagtccattcagtcctctgatggtgtcaaccagagagcaacctactagatatatcatttgtgcggtctggtgtctgcgtcggctacaatctgagcgtctcactttgcggtatgtagcaggaagggtcggccgacgcaactcaacaagtccgctcttgaaatccgacaacgacaacatcgtcctgtgccaagggggatcgttgctctagtcccggccttcgcttaagcgtcattgtatcatcaatgacttgtgttgtaaagaggtgctgtggtggctgttgcaatgtgtagtaagtactgtgtggcaaattttcgatgatgcaaaattctttaccaataagttgcgccattagtcgaaaagattttctgccagcagctttcccttggcacgagcacggtacaagagagatcgagatgccgtcgctcttgacgctgctgctcttctgcgacttcctcgagaaccgcctgcacacgtcgaacctgcttctgctgcgtcgcatgttcagcgacttctgcgtcggcaacgagcacacgctgcaggactttatccgtctcggagcgagtatcgtgacggtgatgtccatggagaggacgagtcgcgtctaccgagaggaagcggctcgcctgctggctcagcagatcaaggagaattccgacgcacagcagttccagctctgcgtcttccgctacctgtcggcgcgcgtggccaccaagaacattttctggctgcgggacatgttcctcgagttctgcaacggagacgacgctctggtgcgtgcgttcgtgagtcgcggcaacgaggtcgtcagcgtcatccccgtggacattcaggctctccaagcgaggtcaatgcagtcacagttcgctccagcgtcggagatgcagctgcagaccgggacttcacttcaagagagactggaacaagaacaccaattagatccctgcagtgactcggaggagaacgaggaggaagacgacgatgagatcacgacactcgccgagttggcttcagtcgcagcaatgccgccgtcggtggaagatctgaacatctgcaccatggaggtgctcgatcgcatcgaggagcaggagccttggaaccaagtcttccgacccagacacgttgcccttgcccgtgaagcggtccaagttagctgcagcgttcaaggagttctgggcgaagcacgctcgcgcagtctgggagcgcccattctgggcgccgctggtggtacctgagcgatcgacgtcgccattccgcaaggaagacgcgtcaagcggcagcgcgcaaggccttccagactgtgatgaggagcatctaccaagagcttggcgccaagtttttcgtccaactggatcaacgctcgaagccgcacaagggctggtggtacgtggagcccgtacaggacctcgtcaccatcgcccagcgcgtgggcttggctgcatgcctccagtacgtcgagtcgcaaacgctccagcgattcccccttgtgcctgggagaaaagttcgcgtggccagaccgaacaacggcaagagcaagagcatgtggtccgtcgccagcgcgatggggcctattttgcgtgagatctgtgccctcaaggaccggagcaacggctcgaagcgcaaggccaagaagtgaacgctcgaatgaggaacgacgcgcaaacccacttcacgtccagcacaatccacagcccaccctggtattcatgtcggcgttttattccttgaaagagtctagtaaatggcgaagacacgctcgaattcattcgtctacgcccagttgcccagttgtttcatcgccatcatcactttggagagagatcggtgtccactcaagcgcccgctcgatgtcagccgcaggttgccaccactcgagaaacacgacgtacaaatgcaagaccgcagcaatgacgcaagccaacatcccggccactgggccgattccatgatacagctgcagacggtggagcagcgagctgtcgggcagagcgcacaccttctcgtacactttctccgtgcgcacagccaccgcatcccagttgtacattttccccactcggtcgtggaactcctgtcgatccacgccggccagtcgaggcaccgcggccagcaccgcctccgcgagcgcctcgggcgtgatgtccgcagcgaactgcaccatgtcagggggcagcacttctggcactccgcccacgcgcgtactcaccacaaagagcccgcacgctgcggcctccaggatcgcgatacagaagctctcggtcagcgagctgttgaggaagatgtggccttggcacagcacgtcgcgcacttgggagtggggcacggcgccgtagagcgtcacgcggtcgtgcagtcggtacttctcccgcatctcctcgagcagcagtcgcttggccccgtcgccgccgatcaggaagcgcactctcgagtcccgcgcgcacacgatggggatggcccgggccaccaggtcgatgcccttgcggtagaccagcctcgagatgatgacgaccgtgatggggtcgtccggcccgagccgcgtggccggcgacgggggcgcgaacttggtggcgtccacggcgttggggatggtggccaccctgtcgggccgcagcgacgcgcgcagcacgaggttctctcgacaggtgtgtgagacgccgatggccgcgtccaccgtggacatggagaacttcatgaccttgttgaggtgcacgctggccgcgtccgcgaagccgaagagcgagtggtccgtgtacacggtcttgacgcccaggcccagcgccttggcctgcagcaggcactcgtgcatgaaggtggacgtggcctggtggccgtgcacgatctgcacctgctcgcggacgcagatggcccggaacagcgccaagtggcccacgaacgtcgggtacgtcacgttgtccaccacgggcgtcaccggcaggtagtagaccttgaggccgtgcgtcatgtagcgcacgcccgcgcgctgcgtgggggtctcagcggcgctttcggagcccttggccttgggcccgggcacggcgtgcgtgagcacgatgaccttgtggccgcgccgcagcaggcactgcgagagcgaccacatgtgcatctccacgccgcccaagcgcgggaagaagaagtcgcagcacatggcgatgcacagccgccgccgccgctcgggcgccatggctgctagtgtcgttggtgtcgttgtgtagtggctacgttatgcagtagggtgggggattgggcgtcagggtatgatggaggagaggtgagcgagagccaatcgaaaacgccgaaaccgcgcgcttcaacttgccgagcttggagaagtattccacaatgaagagcgcatcagcatcaactgacactggttcagtagtgcaaaggtaaattgttgaccttgtgacggattatctggtcgaagtcaacgcgaaacagttgcaacacgtagaatttacacggtcaaacatgccttcaatctgcacttcactgctggtagctacactccccaaacagtgagctgccggagataaaacgacacaaaacagaggaatgcgagatgaaggacccccacgctcttaataacgcttcaaacgtcggccagtcgtcacttgtccttggtcttggccttcaaggcgacgatctcgtccaatatcggtcgcactgcaggggacgacgaccacatgctgatactcttgccgttggctctcaagaagaagttgcgggtgacgccgggggcgactgggaatctcgtgaacgcctccgactcgatgtacttcagacacgtcgccaaaccgcaacgctgcgccaatgtgaacaaatccacgacttggtcgaggtagtaccaactgcagtggcgctcggcactctggtccagtcggacgaagaaagccgccccaaactccttgtagacgagagggatgatgttcttctcaaacgagttctgcgctctgctttgccggcctctccgcagcgtgtgcagctcatggtagcgctcgcgagacagcggcgcccaaaactgccgctcccaaacagcttgggcgcacgtctcccagaactcctgcagcaccacaaccagcttcggatacttctcgggcgagtcgaacggcattgacatgtcggcgaagttgaaggcctgtttccacggctccttggcctccacccgctccagcgcgttcataatggccgtgcggatttcatcatccgagggcagaatcggtccttccaccgtcgggttcgtagcagctacgatcgcgtcgcccttggccggtgctaggactgcctccgcgcgagtttgcttcctagcgcgtctttcaacggcatcagtaacagcagcagcagcagcagcctcactgtgtccattcgagttctgctccaacactcttggcctctttctcggcggaggttgcgtcgtcgtcgacgacgccgctgcttctgaatccaccattaacggcggcgggggcagcggggcccgacacaaggcctggatgtccacggggatcacactgataggctcgttgccgcgccgcatgagctcacgcagtagcgcgtcctcccccctgcagaactctctgaacatgtcccgcagccacaaaatgttcttggtcgccacgcgcgctagcagatagcggaacacacagggctcggatggagaagggtccatctgtgtcggttgagtagtgtccatctgattcggtgtgtcttgggggacgttctccgcctccgtctgtttctgctgcgcgagcaactgcgcagcttcttgctggcgtcgggcgctgctcctctccacgggcagcacggccacgacgctcccgcccaggcgcatgaagtccagcagcgtgtgctcgttgccggcgaagaagtcggcgagcatgcggcgcagcagcgacacgcccatcgtgtgcacgcggcactcgaggaagtcgcagaagagcagcagcctcggcagcggcggcgtcggcatcgcggcgaacgtagcttatcaaagtcgttgtgacaggattttcaccaatagaggacaagttgttgcacggtctctgcacgcaggggagaccatgagcaggactgcaacctgcaagttgcaggtgcaggctgcaacgcaggaccaacgctcaagagaagaagaagacgtggaagaagacggaagaagaagaaaagagaaggacgcgtttcgattttacatgcattggtgcgttaggacagagagaagtgagctagctacagtgctgcagtgtgtaggaagtcaacaatcgcccgcttccctcaggaaaaaatccttgcattttagcaggccgtagccgtcgtcgtggtggtggccgtcgtggcgtccgagctggaagccgtcgtggccgtctccgtcgagttcgacgaagcggtcgtggcgtcgctggcggtcgacgcagccgtcgaggtcgcggccgacgccgtcgtggtcgtcgcagtggtcgaggtcgaggtcgtgtcggcgctggtgctggcagcggtggacgtcgtcgaggtggaggtggtggaggtcgtgctggtgctggctgacgagtcgctcgacagcgacgagcaaatgctcgagaagccgttcgccagctcgtagacgttcacctccaggccgctcgtggggacctccagggtgcagtcgggcggcttgagcgcaatgatggactcgatgagcgactggcagtcgctggacgcgcacatcttgacgtactcggcgtccgtgggcagcgacgtggagtacaagaggctgtagccagagtcgtcgacacagccctggaacgagtcgagcgtcagcaggctggccagcgtcgtgtaggcggaggtctgctgcgaggacgagcaggcgtcggagctggatgagctggaggcggcggccgagccgatgatggcggtaacggcgatggcgaggacggtcttggcgttcatgatggtactcgggtggggtgggtggagctcggcaatccgctcgggttggttcgtgttgctggtggaaagcaaattctggaatggcggggaggcttgaagggctaagctacaacaacttgcggtcaataagccgatgtatacgctattagggggcctcgggttattcctgctgccaagagctctgttcatcaaagctcgaagcccgggtagaggttttgaggggcagttgcagtcattcggtgactacggtgctagggtggagcctactttgataggacaagcatggtgtatcttggcagtcgacgagcagaggcccggagatccgtgagactctcgcttcattacatctcaaccagttttcgctttgtactctttcaacttgcaaacgttgctagctagtgatgctgtcttacagttagatcacataccagtgactttcatgaaattcaaacacgtaccctactgactgttcacaaaagctggactctgctgtaagaagattttaggtagatagcaacaccgggctcgcgtaacttgcctgtagggtgcataaagctactccgtagggataatcaggggtcatttatgtgcgcgtgatccgttgagagcggccaagcaacgttgaagtgatcacacctgctgacacgggtatcctcgcgagccacgccgcgagcaacggagtctgccaccgagcgctgcagcacctatcttagcagcaccaagatgcagctgctgtctggtgctcgcttccatgttgaaaactctactcgtcacacatgcgatcattctcacagactcgcgatctcaactcgactcccattccagaatttgctttccaccagcaacacgaaccaacccgggcggattaccgagctccacccaccccacctgagtaccatcatgaacgccaagaccgtcctcgccatcgccgttaccgccatcatcggctcggccgccgcctccagctcatccagctccgacgcctgctcgtcctcgcagcagacctccgcctacacgacgctggccagcctgctgacgctcgactcgttccagggctgtgtcgacgactctggctacagcctcttgtactccacgtcgctgcccacggacgccgagtacgtcaagatgtgcgcgtccagcgactgccagtcgctcatcgagtccaccattgcgctcaagccgcccgactgcaccctggaggtccccacgagcggcctggaggtgaacgtctacgagctggcgaacggcttctcgagcatttgctcgtcgctgtcgagcgactcgtcagccagcaccagcacgacctccaccacctccacctcgacgacgtccaccgctgccagcaccagcgccgacacgacctcgacctcgaccactgcgacgaccacgacggcgtcggccgcgacctcgacggctgcgtcgaccgccagcgacgccacgaccgcttcgtcgaactcgacggagacggccacgacggcttccagctcggacgccacgacggccaccaccacgacgacggctacggcctgctaaaatgcaaggattttttcctgagggaagcgggcgattgttgacttcctacacactgcagcactgtagctagctcacttctctctgtcctaacgcaccaatgcatgtataaccgaaagtagcccttctcgcccccctccttgtccgcagagatttggctcgcactgcaggttaatatgcattcactacacgtattcaccaggcctcggaaaatacagtatcatattgaattgcaagagttcggtctccataataatcatttcaataaatcattcaccaataatatgtatttatttcaattactttttatattgagaatcatgttaaactcggttttggtatggtcaaacattttactgataattgggcttcaataataacaatttcaatacgaccagcaaccaataatacatatttccgtacaaaaatacagtaattgcaatggaataattattttttccgaggcctggtattcacgaaagcgacgtgaagctctccgaatcgctgccttacagacgttcaattctttcaaacaattctgctgtactacacgcactagaaaaaaacgtagcactagtcctgttgtagtagtagtacaagctaactcgcactacatagtttgccgttttatcttcgataggttgctgcgcttctggtgatcaaacttgcacattgaagtcgtaaagacgaaacaaacgtaggatactcaaaaatgaaggcatttcattagccgtattcttcgcaacgctacaggtgtctagaagaatgaactgaccccagcaccctcttagcaggcggtggcagtcgacgtgatggtggtcgtcgtggtcgtcgtcgagttggaggacgcagcagtcgtagccgtgggggccgtcgtggcggtcgtggtgctgtccgagctggaggccgtcgacgtggcagcagtcgtcgtggtcgcggccgtcgtggctgtgggggccgtcgtcgtcgattccgtgctcgtgctggaggcggtggacgtggtcgaagtggtcgacgagacagaagagcactcggccgagaagccgttcgccagctcgtagacgttcacctccaggccgctcgtaggcacagtcagcgtgcagtcgggagcgctcagcgcaatgatggactcgatgagtgactggcagttgctggacgcacacatctcgacgtactcggcgtccgtgggcagcgacgtggagtacaggaggctgtagccggagtcgtcgacacagccctggaacgagtcgagcgtcagcaggctggccagcgtcgtgtaggcggaggtctgctgcgaggacgagcacgtgtcggcggcgacggagccaacgaaggcggcggcggcaacggtcttggcgttcatggtgctgttaggtgggtgtggagagcagagcgaattgcagagtgagctgaagcaacgcgctcgacatggttcggagcgaggtcttgccgcagccgccggtgtccgccgactgcgctctgtccgaaggagagttggtgcccagcagctctttgctgctcgatgaccagctccatcgcggtgttcggtcgagctggagctgtagagcccagaggagagcagaaggctggccttcggcgaaagggatgcacggtggagatagggcgagaacagtgaatcctgagataccgaggcagtcggcggctgggctgctcctagcgctgacggtggagcttaatgaagcacttgtttaagtgggccagccgccatcgtcgccgagcctcgccctgtacgagttgagttggaagctgagttgccagcagtcgctttctccatgcgactaccggcagcggcgcggtgctcgactagatagcgtccgcggcgctggcggcggcattcaacaagttggtcagcgcagacgacgggatcgattgagacgcgtagatcagatgcgtacgtggcggatacactcgtcccactacagtcacgcagcaagatacaccaaagataccaactgcagtgtcgacgactgaagtttcgagcagacaagttgcacgggggatccggacaagagagcggcgccggcaagtaatgcgccaggcggccttgtcccgcttggcggatcatgagtcatgtcacggtatgtactcagactctgatcctctctgctgcagccgcacttgcgagtgcacccagtgcagctttgccggcgtaagtgatgcccgcccgcccagtggtgagcactgctcactgagcagtagagtggccgcggtgccgagcgtgcaacaggcggcgctgacaaatggccagagggatctagctgtagctgtacgctcctaggctttttaccccacttagcctaccatactcgccacgcttgttgtcgtcctcattgcttcgagaatccaccgcatccattacatgtacagcgaacacaacaggcatcaagtggtggcggtgtgctgcgagttgaatgaagcaatatccacaaccatgtatagtacttcgactgccgccggtgcactgcaatgtattaaaaccaaaacatttaatggtgttatgaagcagctctatacaatatatcatcgtgaatccccgcatgtaccacgcggatccgcagcagtgctctctgtcaagttgacagtatcaacggtaactcggactcaagggcctcgagtcgaggccagcggagttctgcatagaccagtcgtgtcagggcgctagctcgaacagcaaaggcaacgagatcaacaagaagcggtcctgctgcttctgccattccccaatttgctcctcgcaagtaactccaaccgcctgagaccatgaacacgtacttcgctctcgccgccttcgccgccgctctcgtcagctctgtgagcgccgaggcctgcacgggcacgcagcagcaggctgcgtacctcggcatgatcggcctgctcacgggctcgtcgctgaatgactgcgcgagcaagtcgggctacaacatgctgtacgcgacggcgctgcccacggacacggagatggtttccatgtgcggcgttcaggagtgtcacgacctgatcgtggcggtgctcgcgacgaaccctcccgactgcgacctgaccattcccaccagcaacgccgtcatgaacgtgcaccagctcgcgaccaacttcgaatcggactgtgacgccttgacgaacccgacttccgctccgactgatgcccctacgtccgctccgactgatgcccccacggatgcccctacttcggcgcccacggatgtccccacctcggcccccacggatgcccctactgctgcccccactgatgcccccacctcagcccctacgacggctccgacgactgagcctgtggtgcctggcggagcctgctaaaagtttgctttatcttgcggttatctggctgcgttggcagtgagagcggttcgtcgttcgtagtggctccgcaatgatacatcttaatccagtttttttagtttacacttttgctgttcgaaattcacggtcaacactgaatctctacgtatcatggatttagtacatgtattctagcggcagcagcattttaatggcatttccagaaaatatgactaaaaccttttaaaaaaggttttagccatatcttctggaaatgcccctgtgcgcaagcatgttagcaacttctcattagccactggacgagacggcaatgccagggctcgcagatccagcgcatcatgacaagttgtgcgtcgcgatcgcctcctccatccacagcagaactaagtcacagactcagttatgtctccagacgaagttgcggcaaaaatatttcgctggtcgatttcagtggtcgaacatgtacatgtgcagacgatcctctccgtagtgatagcctcgggaaaccactttttatcacagtccagagacatcactatctaaatctgtaccacaatgacggtacaatatcgtttcaaggtgtaccaatacaagcgcattatcactacaccagtatagtgataatgtgcttgtattgcactcgatacgtggttaaagcactagataaaagtatttgttgtgctggatgctataatatttataactatatggcacgaagcgtgacgacacgctgtccactattcaaattgtgatggggcacacagcacttcttaacagaggacgcaggagtatacaaactccaagtgaacagccgttcacgtgtccctggtctgaaggggacgacttgacttgaaaagcggtagatctaagactgaatgtatttataggttggtacagatttggcctgcatacaaatcctaagttccctatagtttgtgtcatacaaaatgtatctgttggctctgaggccacttgggtcactatccaggggagtgaccgatgtagccatcccggaatagtgacagggtcactattccatgtaaccccgttacatcctcccccacttagattcgatcttatcgaccaatcagagcgaggttacgccggcgactcacatttcactcgcaaagtcgacatccatcgacaacggcgcgagctctggcgcctcggctcccgggcctcacagagcaactggcgcatcgccgagcaagccgcagggtctccacgtcgaccggaagcatgcctccaaagcgcagtgcgcgcagtgcgaaagcacctccgaaaccgcgggccgtagggccgaaaaccagggcggccaaggccaaggacgagtcgtccgcgctgatggaggccacgaagggggtcgaggaggtggtgcgctctcgtagcagcacgccggagagtggccgtcaggccggggctcggagcaagtctcctgacgccgcgcaaggcaaggaggagagtcctcggggccataaaagcccggctcgcgactgggaagccgccgtctttgactgcacgatggtccagtactccggtgagagttcacccgtcgacgagaacgtctcggagggcagcacgcacgctgccgaaggcacggagctggcggcaggcgacatgaccaacgcctcggccgacgcaaaggcctcgtcaaagaaggaggcggaggacgccgagtccggctcaggcgacagcaagcagtcgcacgacgaagtcgccatggccgacgctggggtcgtggccgagaagtcgccgagcgacgcgggctccaagcccaatgaggtgctggcatccaagcatctgacgctggcacaaggtcgtgagcgtgcccaagcgtcgaaagcggctaccgcagcgaaggccgccgaggccaaggcgaagaagcgttcagcttccaggtcgcctcgcggctccagctccaagctgttcatcgactcggagtctgagggcgaggagggtgccgttcacgagcccaaggagctctccaacaacctcgacgagcagcagcagcaataccacgctgctagctcgggtgcgtatgccaggcaaccgactgccaagactgccatcgagtcttcttcaggcggggatgccacgtacccgcagggctacttcccgcccgagcctggcactggtgcgccagcgctgttggagaagctctcggctcctcgtggccttatcggcgggtacacctcgaggggttcctatgagcgtgctcttgttgagcaagagccactctttcttggcgacgttgaagtcgcccggtgtgctactagcaccacacaagctcacactgaaggagttcacctcgcttcgcaagaagccggaggacaagggtggactccatcctgtgtggggtttccactgggtcaagccgaatgacaacatgacccggagcgaggtggaagacctcttctggcgctacgtccagcgcaaagggtattccgaccaagagtccaaagaactccgtgaggattgcactctgtccgcaatcctggacgtgcgcgagctccgcatcgagctcgctcaactcgtgagcaagcgcaagctccactcgaagatggacgagctgaagcaagaggcgagagccaaagctcgtgaagagcgtgggcgtggtgcgactacgtctgctaccgtgccccgggtaccggccaagaagccaaggactacttacgaagctgccgctgcttctcgtcccatatcgcaacagccttcgggcagtctgcctggcgctgctcaacgggctcccacgagttatccgactcagggtaacccctccacttcacgagcagctggcgcttgccatggagccgccgctcccggacgactcgttccacgtggtagtggatctgcccattacgatcaaggagggccggcggtggcctcgcacggccatggctacgagcctgaggcgacgcagccgtatgctggggccccgagtcaggtggtggccctgcagcaagaggagattcgtcttccccgggaccgtgtgtacgtcctcgagatcgcgcttggcgtcggccttggtggcgaggctgccgctcctgctggtcagcctggtgccgtggagcggctccgtgaggatgttgcctcgctctatcaagaaactcgcagtctccatggccgtgtggatcgtcgagccgacctgtcgtcttacgactcgctgcgaaaccagctcgctggccttcgggccgagcttcatggccacgcgccgtatccggagcagcagcagccccactcgtatcaggcccagtttgaccagggctcgtacgggcccccctgcgtatgctgctccgatgcacgccgcgccgtcttacgaccagcgcgcgtatcaggcgccttaccgcgactcgacgccgcgcttcgagaagctgcgctcttctccaccgggccacccaccgcttcttgcggggcagccagagccagatggtcatggtatctcttaagacgacccacgtaaaacgtcgggtgagtcgtcatcgacttgggcaagtctatggtgtacgccgcgccatgccggctgaggaccgtgaagggtccaatgaagcggtgcttcagcttgttgctctcgaccgagctaacagtgtttagcggtaggtttctagtatctaggagaactaaatccccaaccttaaacacgttcatgtttcctcttccatttcggtcagagtactccttctgtttatcttgggcttgcgccatggtgtctcgcaccctgctgattatgttcagcctttcttcggcaaacgaggacagttgcttccgcaaggtggctggactcacgtccgagacttgggaggaaaaggttttccgagcctctcccccacttaggaccgaagccccggtactgcctcgtaatgtgagcggcacctgagggtggcgcaacccgttcaggtaaaagggcgtaaagcccgtcgatgcatgtaccgcattgttgagtgcgaactcaaccatgggcaagcgatcagcccaagagcggggcgtctccgcgcagatactacggagcgtgtcttcgagcacgcgattgacgcgctccgtctggccatccgtctgcgggtggtccgccgtcgacatcgaccgccgtgtgccgagaaggcgaaacagcgtctgccagaacgcagcggtgaaccgcgggtctcggtcagagacaatggtctcgggcagaccgtggtgcaggaagacacagtccatgaacaggcgagcgacctcgtcaccagtgacggtgtcacgaactggagcaaagtgtaccatcttgctcagacggcaaaagcaacaacaccggtgttgccacgggcatcggccgggaggccgaagacaaagtcgagactcatcgacttccagccgtccgctgggaccggcaggctctgcaatggtgccgaggcgtgaccggcaggcttcacgcgctggcacgtctcgcacgtacggacgtaggtggcgacccacttgtacatgtgacgccaccaaaacatctgcgagacagacgcgtacgtcttctcacggccgagatagccactggatggagcgtcgtgcgcctccatcagaatgtcgtacttgagatcctcgtcgttgggcacgacaatacggggaggatcctcgggctcgaccctatagtggagcaaaccgtcagcccactcatagcggtgcagccttgcacgttgtcggggcgtgagccactcggccttggcttccgagccagcggccaagaatcgcacaagaggtccgagactggcatcgtctcggtaccccagcctgatgcgatcatacagatccgtcgtgacccgactaatatgagcaagctcgtagtcgggtcggcgcgacagcgcgtcggcaagcacgttcaacttgcccggcttgtactcgacacggaagttgtattccgcgaagaatgacagccaacgcgccatccgctgtgagagatgcggcgtgttgacggcagtccgcaaggacgcgtggtctgtataaacgacaaagggcgtcgagcccaggaggtgcactcggaacttgacaagagcgtacttcatggcaagtagctccttgtcgtggactggatagttccgttcggctgccttgagctgcctggactggaacgagatggcccgttcgcggtctccatcgtcggcctgtaatagcgcacagccaatggcgtagtcagactacgctgaaaggcttcgtctcatccggcaatgccaggactggcgcgcgctgtaagctcactttgatgtcgttaaaagcatcttgatggcgacgctcccagcgccaggcgacatccttcttcaggagatccgacaagggccgtgccagctaggcgtagcctgcactatacttgcgcaggtagttggcgaggcccaaccactgtcgtaggtccttctgcgaccgaggtggcggccaagccgagatggttttcaccttctccaggtccgcccggaccccggcgctgctgacgaagcagcccaggaccttgatctcctcagctgcgaacacacacttgtcgatgttggcgtacagcttattcgcccgcatgacttcgaacacacgtcgaaggtgctggagatgcacctccatggccgtctggcctgcctcggcacggctgtggacgaagatgtcgtcaaagtacgtctgtgtgaacgcacgcaaaggtcggaacagttgtgtgaccaagcgattgaacgttgccggggcgttagaaagcccctgaggcatgaccagccactcccagagcataccgctcggcgtgctcacagccgtgagtgggatgtcgctctcgcgcatcaggatctggtagtatccgtccaccaggtccagcgcgctatacagcgcgcagccggccatgttgttgagcaacacgtccttgcgcgggatcggtatctgcgcaggcactgtcgtgctgttcagcttgttataagcatgaaccagacgcaactttccgttcggtttgcgaacacagaaggtaggcggcgagtgcggggacttcgactcccgcaccatacctgcattcgccttggcggcaaagaaggcatcaatgacttcacactgctcccggggaagaggccattgcctcgtgacacagtacttcgtgcccggcacgagatcgatctcgtgcctgattcccctgtccggagtgagattggacggtggatccttggacaccacgtcctcgaactccttctccaaggggtacaccgggtcccgggggttcttaagaatctcagagcccatgcgcgacgcgcgctgtctctggaactcctccaggactgcctggtccatgatcgaggacgagttcaactcggccgacgtgaactccggtcggaggagaaccaactctgcgatctccccggtctttagctcggccaagaagtcctccatggcgagctcctcaaggttcagcaactctgaaacctcgagcagagctgtaagctcgacagctcctgtcttgacccaacgaccggtcacgccgtcgaagatgtgataacactcttcggcggctggagccttggctggaggctcggagtcgctggcgactggcgtcgtcggccacacgactaggccaggcttacgacgtgaccctcgggtgtcttcgtctcgtggcgccgccttgacggcaccaccgatcttctcgatcttgtgcggaactacgttacccgccttgtccttgagcggaacttggttacccgccttgttctggagcggaacttggttacccgccttgctgggtggaactatgttacctgtggaacttggttacccacaccaggagcgcttccagcgactcccgcatcagttatggtctgagtgacctcctgtggaactatgttacccacatcggaagcgcctgcagtgccttcctcatcagttacggtctgagtgacctcgcgtggaacttggttacccacgccagcgccagcggcgccttctccagcagcccttgctgcctgcggtacttcgttacccgcgtgtgggcctacgttacccacctggtaggtgctgtccggcacctccactctcaggccttgtccggcccagtcggagtcgtcgtcagtctcgacggaccccaagaactcattagacgctgctgcgccctggcggccctcgcgggcgccccagctgctgccagaggtgggaacatgactcaccaaagctctgtcagagcgtgggggacggctggcctcgatggccttgccgcgccagtcgatccaagactcgtgtttctccagcaacggcatgccaaggatcaagtcgtacttgtccatgtctaggaccaagaacggctccgtgctgtcgaagtcctcgaacttgacagtgaggtccatgtggacccgaggtacttctaccaccgtaccgtcggccagtcttaccaagaccagcccgttgcctttgctgcctcgtagagcatcggcgtacttgtcgcgattgcgtgcgacagtctggcggcgcgcaaagttcttggacgccccagagtcgatcaagattctcaagggatgatcgtatcccggtacactcgcgtgcaccacaagcagcccaccgctgcccttctccgcttcgagagtacagagactctcaggggctaagtccccatggcgtgcgctacccgcacgcccctcatgaagacttagtgtttccccagtagggcgccccgcccctactggtgtccggcgttcccctggttcctggggcgcggcttctgccagcgacccctagagccaaagggcttcgaagagaacttcttcttcagtcctgccgcgggacaagcacgtttcatgtgcccaagcttgccacagccgtagcagcgaatgtcgctctgctcggccatgcccagatccatgggaaccggcccgttgatcgctccattgccggagttaccattaggcgcaccgccagaggcagggttgctctgccataccgtggctggggtacgagcctgcttgtggctgtactcctcctggagggcgatctgaatcgcctcctccatagtgtttgcttgcacacggaacagttgcgtgcgggcaggaccgacacgcagaccgtccatgaacacggtcaccttgatgtgttcaggcagggggttccccaccaaagaggcagtgagcactcgcatctcctggatgtactcatgcagctcgcgccttccttgtttgcaggcgaggaagcgcgaacgctggcggtactcgtagttcgccggaagaaacgcggcccgcagctgctcgcacagctgggaccatgatacgatgcatccaggcgtcgtcgcttcgcgcgtatacgcccaactcttagcgcgatcactaaggttggagagcgcaaaggcgacacggagtcgctcgtccgagacgagagccgcgtccatcgcgagctcaacctctcgaacccagaagtgaaggttttctccttccttcccttcgaaggggtgaaccttcagccgcaggggcttcggttgcaccggcttcggcgcggccgcagtggcctgcagcccttgaacgtgggcgatgagccctcgctcgtaggtgtcgaacgcgttgatacgctcaacctgctcagccggcgtcgccgccgctaagctacgcagggcatctgtcccaaagatgcctgttatcttacgaacggactcgtactgcgagtcgttcagatggggaaactccgtacgatccatcttggctcactcgatgagaccacagagtattcaggtagtccaatctacccgcgtaggcgtaggattgactacaagtgctaccaagtgtgacggggcacacagcacttcttaacagaggaagcaggagtatacaaactccaagtgaacagccgttcacgtgtccctggtctgaaggggacgacttgacttgaaaagcggtagatctaagactgaatgaatttataggttggtacagatttggcctgcatacaaatcctaagttccctatagtttgtgtcatacaaaatgtatctgttggctctgaggccacttgggtcactatccaggggagtgaccgatgtagccatcccggaatagtgacagaacctttccatggatacagaggtgcccatggaaagctccactacgcctgcaactcacgttgcacgcgctgactgtccccacctgtcggacccagagtgggaagctctccaacgactgtcaacagtcattggtgaggcggctgtagctacgatgctgcgtacgctaacgccgacagagcaacacggtgttgtcctgggattcatcatgagggaacagcgagatgctgcttcgtctaccacggtgccgtcggggacgacaccgcgcgcgcaatcgctgaaggtcagcgtgagcaattacgttggaagagagggcgagcctctcctcagttggcttgtcgaactcgacactgccattgcggctcgacgcatcgtcgacccgttgtcgaaggtcgcgttcgccatgtcatgtcttggcggacgtgcaagaagttgggcgtatggacgccgactctcggatcctacgtgctttagcacgtacgagggtttcaaggaagagctcaggcaagtgtttgagcccccgcaaaacgagttccggtcgagggcggagttcctcgacctgcagcagggcaagcatgatgtccatgcttacgctcagagagcacggtacttggtctcgaacatcgtgaccaatccgatcgacgaggcgaccaaggtggtcacgttcatgaagggactgagagatgggcctgtgaagacctatctcttccgtgagtacccgagtactctcgaagctgcaattactcttgcaatgcaagaggagtttagcctgcggcaggctacgctgcatgcacatgcgccgaggccacagcctcgcccgatagtgaggacgggaggcccagaacccatggacctctcgagtgctgcaactactggaccccagcagtcgcaaggaaacaatgtgcgatgctaccgatgcggtagagtcggtcactttgctcgggagtgcacggcccccgtgcccggcaccgtcgcaaccaaacaaaaaacgctggacgccagtaggcgcggggtgccctactggtaatgccgttccgcatgtcgaccatggacacgcgacactgaggactgcagcccccagtgaggttcattctcactgcaagatccaagatgacaagcctgaccttgtcatcctgaccttgaactcgatgagagcaagcggctctcttcgtgctttggtagactctggcgcgtcgaagaactttgttcgactgcgaagtctatcaaggcttgacttcgaggatttaaagatacctcgaagtatgctggaggtacgactggcaacgggtgccgtcgtgaagaccgagaagcgcatggtacgcgtgtgcttcacgtatgaagaccaagagtttgtcgagacctttatcgtcctggatctggacgataagtttgacatcgtattggtcatgccgtgcaagccacggcatgatccggtcatcgattgggagaagcgcactctcgtgcgcttcggtcgcgacagcggaacagtgcgcgttggccctgttgccgctacgcacgcaccgacaggtgcgcgcgactccccactcgagacagcgcctaatgccgctgtcccggagcgccctgggcgcaagcgcgcgcgcaagagcagcaagcgtcggcgtcgtcgccgatggctgaaggagaaaatgtgttgatctcggagatcgacacccgcttttcagcgaatcaggaagagtctccgacctcaaggggcacggatgacgcaggcgagtcacacgcctcagccgtggaggctgacgcgaatctgattggatgagttttggccaataacaagagccaatgtgacgaaacgccgtcgactccgggggtcgatggcttgggtgaatttgattcgtcggctcggggagccgacgcaccctccgtaatgggggtctccgccagtggttggcgtcgaggtactgaagtcgcgacggttccgggaaccggcgctgcgaaaagaagtttcgcgtcgactccgggagtcggcgcaccctttgtgacggagggctccgccaataacaggcgtcgaggtgcagatggcgtgtcggctccgggagccgacgctgcaggcggtgcggacggttgcaaacgttcggcaccggaaaaacttgcatgctgtcgtgcagccgggctgcacgacgaagcgccgggcgaccaagccgggcttgatgtcgctcgcccgcgggatgaacccgccggcggtactgaagaagaacacccgtccacggctgggcctggacgaggtcaagaaccaagcggagccgggctccgcaaaacaagaagacggcgcatgcgaaggtcgctgcgcaagtctcggcctggggccgagacgctacaaggaatgtctgccgggcagacggaggctgagaagccggacgtcgagacgttgaacgtcttgacgcgtacctgtgccgggttccggtacagggagatgactctcgctaaccctccgacgcaagcgtcggagttgactccgcttccagtcatgagctggaagcgcttcgcgcgtgacttgcacgatggacgcatcgagcaaatatgcattctctcggacgccgagagaacgaagagcgagaatgaagaactgaggcagttcttcatggaaaccaccactgagagtgaggacactcacagtgcgaagactaagaaggagcgctttgaggagcagagctgggactcgctgaagtcgagtcccttctacgagattctacgggagtacgcggacgtgcttccggaagcgatccctgcggagcttccgcaggataaggggatccagcacgaagtactgtgtcacgcggcagtggccactgccgcgagagcaggtcaaagcgatcgacgacttcttcgaaagtcgtcgcaaagctagatgagtgcgggaatcgaagtccccgcacagtgctccgacgttctgtgtcaagaagccacagggcggctggcgcatcgttcatgcgtacaacaagctgaacgatgcgacgataccggcgcagacgccgatacctcgaaaagatgtcatcctcgattcgatggccaggagcactatctacagtgctcttgatctgcgcgatggattctatcagatcctcatgcgtgagagcgatatccctctcacggatgtgagcacgccgagcggcatgctctgggagtggctggtgatgccgcaggggctgaagaacgcccctgcgaccttcagcaggtgcgtgacgcacttgttgcgctcggtgcgcgacttcgcaccgagctacttcgacgatgtgttcgtccacagccgggctgcggacacaatgagcgatgttgagatgcacaagtgcatctccggaagttgcttgcgctcatgcgcaagcacaagctctatgcgaacctgaagaagtgcatcttcggggcgagcgagatacccgtgctcgggtgtctcgttgggaagaacggtgtccgccctgaccctgagaaggtcagagtaatcaatgagtggccgacgccgtcgaacgtcaaggaactgcggcagttccttggcttggacacgtacttgtgcaagtacgtgaaggactacgccggtatgatacgcccgctgtcacagctcctgaaaaaggacgccgagtggatttggactgctgagtgtcagcaggccttcgatgcagtcaagcagggcttgacggaggcgccgaccttggcggtggccgaccaggatcgcccattccacgttgtgtttgacgcatccgacttcgcaatcggatgtgcgttgatgcagcacgatcacgagggccgtgatcgtgtcgtctactaccaatcgcgtcagctgaagccagctgagcgcaactacccggtgcatgacaaggaactccttgccatgaagtacgcactcgcaaagttccgagtgtatctactcggaagcaaactgttcgtggtctacacagaccacgcgtcgctgcggacggctgggaagtcgccgcacatctcgcaacggatggcgagatggctctcattcttcgcagagtataacttccgggttgaatacaaacccggaagactcaatgtggtggccgacgcgctctcgcgtcgacctgactacgccacgcctgatgccgacgtcaatgccattgacgccatgcgatcgagcaccccaacgtcgtctctgttggacgacgtgaaggtcgcgtacgcgcacgacgcggacgcgaagctcttgctggcctacggctcagcgccttctgacaaaactcgtcagaagttgcggaagcatcttcgtgctcgtgcacaccgttatcgggtgcacgacgggttattactctatagtgcagttgacgacaacgcggaccgcgttgtcgtgcccaatgaccatgacctgcgactcaggatcatgtacgagtatcacgatgcaccgactgcggggcatccgggccgtgagaagacataccttcttctcacgcgagacttctactgggcccaccaccaccagtataaatgggtgcgcaagtacgtccgtgcttgcgaggtttgtcaacgtgtgaaggctgcgcctttcgcgcaggctcccttgcagtcactaccaactccacgagagtgttggcagtccatgtctttggacttcgtgttcggtcttcccccggacagccaggggaacacaggcgttgtggtctttattgaccgcttcagcaagatggtacatcttgctgcggtacccgctgaagggactgcgaagcagacggcgcgtctgttcgttgacatggtgttcaaacaccatggcatgtcgatcgacattgtgtcggatcgggacccgcgcttcactgcacacctttggcaagaagtgttcacacttcttgggagtcaactttcgatgtcgactgcggaccatccgcagacggacgggcagaccgagcgcgtgaaccgcgtgctcgtagacgtgcttaagagctacgctcactcgttccaacactggagcgagtgcctgccgatggcggagtcgccatcaacaactcggtgcatgcctcgaccgggcatacaccgttctacgtgaatgccaacagacacccacgcctcccgagtctactcgggatggtggctccttccttaagtgggggaggatctacgactgcaacgcagcagtcgcagaatgccgctgacacttgcacagtgtcagccgcgactacgcgcaacaagaagaagaggaacgggtctgtgcagggcacagacaccgcgaagacgaacgcagaggccgggcctactgctagaaacgagctgaactcgttcagttcggacgaaatcaacttcgtacaacgcagacaagccgtcattcggtttgtccaagacgctatcgcagcttctgtcgaccgacagaagctgaacgcagacaatgttggtaggggcaacacaaatgaattcaagaagggttcattggttttgtcagctactcaaaacctgcctaaacacgcagtttccgacttcggggcgagcaagctcgctccgcgcttcatcgggccgttcacggtgttggcacggcatggcaacgcctacatgctagatattccatctagcatgcgcctccatccgaccttttacgtcgggcggctgaagccataccggcagcacgagccatctagctcggctggcccgaagcggaagccccagcgggagtgaacctctgctccagcgcgtgaacgcgctgggccaagcgtgcgacgcgacctcccacgtcgacagagatgtccgacgcggtctgcgaaccctgagcgactcgagccctccggatcgccacctcctgcttcagagcggcgaactcccggctctgatgctgttcgacagcagcgacccgctcctcgagcgtcgggccaaggtcaaccccaggttgaccatacccggggcgtgttcccaccaccgccgcctccgatccgcgacgcccgcggctcaacacgctggattgttaagcgtattgtgaaccatagtatcccgaaaacgaaccggcagccgtttcgttatcgtattcgttggagagggtttccgccccaccaagatacatgggagccgcggaacgtcctactgctggacgttccggaaatggtgagagcgtacaaagctcaccacgcactgccgacgcgaaggtagtgcgagcgctgtggtcacctacagcgcccgaagtcccacgatcgtcgcgctcctcacgtgccaagaacttggcacggagattcttgagactcgcaggtacacgaatcgtcgtgtacccgtttaagtcgcggtcgctcaagcgcgccgcacccggaagacacaacgtgcactgatggccttcgggcacagcgcatggaataccagcgtccacagaagatctgtggagctgctccagcctcccgcgcgtcgagaatgtctcgcagcgctcacgggcatgcttaacccgctcgcggtaagcagccggcttcttgttgaagttctcaacaaaagcattccaactttgacaaagtgcctgccactcaggcactttgctgcgagaagaggtcttcttgctggagaagtaccggagctcgtggaagagcccggtgtaatagtcacgcctttggttcgttaacggatcaaagtgctgctcctccgcaacagcatcgtcgtggataccgctgcatacgtacagcgggatttcatttggaggcacagtgttgcccactcggtctgcgatctctgacgcagacggcatccgcggagagcttgaaggcgccacctcacgcggagagcttaaagctccagcagcagagcggagtgtcgctctcgccgcgcgaacgcttcgagctcgaagcgtccgagtcgtctccttcacgagggcgtctcgacccggcatgcgggtcgagactatcactgtcgatagactccctgcgcttgctagaagaggcctcgccctcttccatctccacgtcgtcatcctcgaagtcaacggcgtcgttgactacagaagaaccttcgaggacaatctctggttgagttgtccccgccgcagccttggtagcaagagcgtcacgctttgctttgagacgctcgcggtactcggggatagagagagtctctatcccggcggaggacttcccctctgctgcagcgtcggtcttcttctcaggcgagctcattgcggaatgagctcgagttttatttctcccaacgtgaagaattgacgaatggtcaatttcctgagtgacgtgccgtgactcggcgcgtctaaccttgaggggggatggtgtaacagggttacacgcacaagtggcaacagtcacctgtaactctaacagatacgacgtctgttagaggttcgaaagactttctcgaccttggtatagacacaccaaaggctacatacatttacgaccaccacgacgggtggtccatagagacttaggattcctattggctgagagcagcatcttttagccaatgagcgacatgcatagcattggaattctgcctaccagccgttggcaaattcctatctaagaatattacatttaggggaagtcagaaacataaaacaaaaaatagcagttctcattttaacccaaaaacattatttggatcgtttatttagattaatctatactcggaggcccgagtgtaattaactctaatttaaactaagctacgcttcctcacatatacgcgcacacgtgtaaactaaagtagtgagccaaaggcccactacaacaactgatgtgcaggtaatatccttgacactccccctgcagcaaacagccagtttttcgtgatgaccgaaatcgggttcaggcttcgtcctagatttagaacgacatcagcagctcgaacactagctgggccttcttactctgtaaaggctcggcggcgttggtttagagacttcagaagccgttctaaaattaggagcagtcaaaagaggaccatggtgaagcccaagcggctcccgttgtacgagtcacccctgtcatccgctgatgagctttcagacgatgactatgtaggtagtgacgatgtttgcagtgaggacctcagtgacactggctctgcgggcgaggggatgtacgatgacttgttctcgtcggatgaggagccggaggagccatactggaacccagaccccacgctgcgttgggacgtttggcagatcgacgacttcatcatgactgagacgcccaacgaaaaggagggcggcgtccctatcagtaagaccttcgtcagcgtgctgtgggattgacgtccgaagcctgccagcaaacgctaccgctcgttggagccgctcgagaatatgttggagactcaccgcgaggagtgctggctggtactgcgcttcaagaacagcgggatggagcacttccgcgagttttgcaagactgacttgtacggcagggccatcattgctgcgggcgaggactactcctgcatgtttcgagctatggcagttgcggccaaccttctcaagcgccccaacctggttccgcagacggtgatcgatgctttcttcgccgaggctaagagcaagttcgacgtggacatgaacctgggatgcaattggaagcagttcacggctttcctgcgcaagctgcgccagcatgggactgcgctcaagattaacgagatgattaaccctttagtgatcaatattatacttggatttagtatactgaagcccctatagtaaagtgtaaaacatgcataaatgcttggttttgctccgcaccccgcagcataatatatcattttgcaggggtttaccaataattattgcaattattgttgtaaaacctcgcaatatgcttggttttacgcaaatgatataataggtcaaaatcaatagaggggtgatttgattggattaaatttgtaaaaccaagcatattacaaggttttaggaccgccaaccacaatagggtttagaacaactacgtccaaggcgggcgtcgcgggccgcgtgtgttgagcgagctgactccggacaagggcgttacggatggattgtacatcgtggcggcttacaacgtccgattcgtgggtcatgcagttgtgcttcgcgtggcggacgggggccagcgcaagaccattatcgacaagggcaaggagaagcctgtggaggagtgtcgctggatgaacttcttcgcctttgtgcgtccgttcagagtctggtaatcgcgaagtacatgtcgggagaggatttcacggtgggttttaaatcttcagacaaaactaaaatgctctcaccattaaattgttcttttatttatcatcaaagtgcaaagtcttatataattttcccctcattttgtggtggggagctctctcattttctcaaatagtggcttcgctaaaggtttagtgaagatgtcagcgcacattgcattggtgttgcaatagctaacagtgaactccttgcgcaccaccttctcctgtacgaagaagtacttaacgccaatgtgtttgctcctgccgtgaagctctgggttgttgtatatcttaatgcaacgttggttgtcttccatgatcagtgtgggctttgagctctcgtagcctagttctcttagcagtagttttaagtagatcagctcttgcatgcagtagcagagtgcgatatactctgcttccgttgtggagagcacgactgtgtggtgtctccgtgagacccagctaatgggactgttgcagaacatagtgatataaccaccgatgcagcgtcgtgtcttagcatgctgtagtctgagtccgtataagccatgagatattcatctgactgtaggagctcgaggttttccactccaccaagagtgatgccaaagtcctttgtgccattgaggtagtgaagaccatgctttacagcattccagtgaggcagccccgggttgtcaaggtactggctaacttcacggatgaagaaggcaaggtcaggacgagtacccgtcatcaggtacatgaaactacctacagcttctcggtacggtttgttggccatcatagccttactagcgtcgtcggtaggacagtcggtggcactaagcttctgcgcgattggcgtgctctttgggtgactgtctaacattgagaatctgtctagcactttggtggcgtagctcttttggtggatgaagatggagcggttagctcggttcctttcaattggaggtaggatactccccctaaatcggtcatgtggaactcggagctcagggccgatttgacccgagcaacgacatttttggacgggtagatgatcagcaggtcgtcgatgtaaaccgagatgtaacacggcgcattgaatataaccttaaagaacacgcaacggtccttaactaggcgagtgaagccgagacgttcgaggtacttagcaaaggtgtggtaccagacacgaggtgctcgcttgaggccgtataggctcttaccaaggctgcatacgaggccagggcgatcctttgaggtgaatccctcaggctgttccatgaagatttctacgtcaagtgaaccattgaggaacgccgttttaacgtccatctgttcaatttcattgtcaaggattgctgcaagcgtgaacagcagtcgaaggacttccatgcggacgacaggagagaagatttctgtatagtcgatgtcgtacttttgctgaaagcctttaatgacgaggcgagctttaaagcgcacaacgcgaccagtttcatcgcgaaaacccatcggcactggagcaccttgcggttgtgcggccgcggcaccagtgtccacgtttggttttccatgagtgaccgatattcagagagggcagcagcgtgccagtcagatacatatggggagcgcatggcttccttgtaggtcttagggtctgggtcatagcgagcagctaagagagtaatgatggtatgatgaagggtatgttcctcttccaggtcaatgggctcgttgagcagtagcgccttagagtagatggcgagggcgtcttttgtcttaagtgcgatcaacattactattgaatggagcacggtgtgctttagcaaagatgcacgaggggcagaagtgtttggggatcgctgatgcttgagagaacgccagttcaggggccgcttgggtcctagacatggtctgcatcacaggaaagttaggatgagcgagacgcttgtgccacaataagacagcagggtccatacctgattgagccacaagggcattggcgggttgattgtccgcaggagctggggccacgggcgcgctgggcgtcttaagtgggattttcgacttgaactggaacaggttcatgtccgacgcgagttcgacgtggaccttgtagtccttgcccacgaagtagtgctgctgaagacaaggcgaatacccattttcagcacctgggcgatggacaggaggttgaacttcatgtccggcacgtatagtacatcacggaattccatgaggcgggtagtaccggtagtgtcaaccacctcgaggaccacatcaccaatgccgcggttgggtagttggtgtttgccaccgaccatgatgacgccggcgtaggggcggatctccttgaaccaggcttcttggtaagcagcatgtcgagtgcatcccgagtcaaccgtccccgcggggtcatgggggtcagagcccgtagccgacaaaccgatgtccggcatgatgacagtcgcatatgcgatgagccccgcttcgcgtcctctcgagctgaacttgcgctggaggtcctggaagttgaccgggttgccagagcgatcatagatgtccggacccttgagcccattctcattgcgagagggtgggcgctgccggtcatccgagcgttgggtgcactgctgcttggccggaaaggggttggggtcatccctcggcttgcggtcgataatgccaaagtttgctggcagcactgtgccctccttgacagtaccagtgcgcaggtgcttctgcagcacacggcagttgcggatggcgtgatttggccgcgtaggtgcaaccttgagaacgacgaggcgggtcgtctcggccatgaggtgtgttcgcaatgacctgaagtgccgtctcgctggccgtggtgggggtctcggggctgcccttctcaatcacgtacttgcgcttggcgtagtcattcagcactttacgctcaatgttggtcttggggtccgtgtacaggataaacttcttgctgtccttccaaatcgcaaggtcaggcttccaggtactaggcatcgcatgatagagatagagtgacttctgttcgtcagtcatcacaatgccagtagcttcagcagccgccttcagtgcgcgctcgaaggtcaggaagaacgccatcagatccgtaccctcctcatacttgatggtcatcaagtagtggttgatgtagtacgggtcgccgtgggcagtcgagccctcatagcggtcacgcagcttttggtagaacgagtaggcagaagtacaaccctcgacgaggagcacgtgggcatcatcgattattgagatcaggaacgatcgagttttgcgctccattcggcgtctttcgtgcgggctcggcttgcgagccgctcgcttcttggccgctcgaagcttcgctcgagccttcttggcctgtgcgcggagcagtgctcggcgtctttccttgtcgcgcttggtctcggtgaaggacttgatcaccgggggcggcggggtgggcttggcggagcgggacgactgagggtcagtcgccatcgcctcagaggagttgcccgacgaagagtccgacgacgcgccggacgaggagccaggctttggttgggccgtgctgtcgtcgcgcttggcatcatcggcgtccagaccgccgtctggagacagggttccggtgtcggagagcaggtcgtccgacttggtgggcgagggtgggtgggaaggcttgaggtcttggtcgtcgtcggagtcgacgatggacgagtccgagtcaccgtcgtagtcctcctggtcgatgaagcctagcaggccttaaccgtcgagagctgcgcggatgcgagcgttccacactgggaagttggagccgttgaggcgtgggaagtcttccccgcttctccctatcgtttggcttataacctctcgagccatcagcacttgcgcaggtcgaagacgggagagaaggaaagacgtagacgtagggaagattggaaagtgagatgtattcaggttagcgagagagcaagaagcaagtcaggcagcggcctggagagacgacgcgtggccgaccatctaggccgtgccagatctggtacactagaatgggtctagatggggggggggtaattactcataactttttacgaagtttgtgtacaactgatgtgcaggtgatatccttgacaatcttgaacgtagaccaattgcctgtgaagctgctccactgaagcaccagtttcatctgagcttgcgctcagacggtcggctattttgttgatgctgaacccgatagtgaagatgtggcctgcacacagtagcacgacttccccccagctccgttcacaataataacagtctggatattctttcgtatgttacatatgcgaggataaaataatctcgggagcacgagcaatctcataaacacaacatagtcgttagcattcattatttttaccacgcaatgcccctaacagatcgcatggtcactacggagagggtcttgaaggaggaatgatttcactctgaaaattggtatacatgttcacattggtcatagtagaaggttgacaaagtttgcagcatccaaggctgtaaagctgagctacaatgctgcaggaagtgacgaggttgcacgttgcccctaaatcctggtgttatagtttattttatgcacatattatacgcttttatgtgcgttttgtggtacaaatgtcaatctccaactatagtaacttcagtatagtgatttgtactccggcgtaaccagctcagcttaccatttctcataacaattttgatcagctcaatacaacgatacaatcaaacacgatggtgtatcaacttttttaacagtgaaagtgtagcatgggttcgttacactggttctgcctgtttgattggctcaaatgttcgcccacttctcgcacggcgggcgcacaagggaacagcatactgtcgctgcgatggctgccttcgtcgtcatgaacgcaggcgcagcagaccctgcggtcatgaaaactactttatcaatcggtagactcactcggtagactcgatgctaactggtctgagcagcctggtactggggcccaagagctgccacgcacggcacttgcagtcatatgaccaaggtcgcgagcgcggatacgacgtctttggtctgctcgccgctagcagcagaggcgggctttgaactttcgttgctcaactaagacatattatagcaagggctttgtatttgaggttgttgcacgcgccatctcgtggtccagtcgccgagaaacgccgacaggagcacgagctcgtccggagtcccagagcgggaaggcaatgcgagcagcaggagatggacaaggtgcccagcagcggcgtctaagtgcccgcacctgctggggaggaattgcacctagtccagtggtggtaatatgtaggagaatgcacttttaaacacctattaaaataggtgtagacgaaaaaactcatgagcactttcaagctccaggactcctcggtccatacgccgccgtctggcaaaagcacttcaaagccttatttttgaccaatcacatacctctatctatgcgtcacctggtctggttacggaatctcgacacaagtcattggttgattgcgatacatgcgttaccgcacggcaacgtctcccagagacgtcttttcggcgagctcgttctcaacagctaagccaacaatataaatgcgcccgatggaatccatttgttataatagcaaagtcttattgtgctttgcatgctttctgtctaaacaacgacgtaattcgttgttttggcaaatcacggcgattagcccatcattgagttaggaggctaactcgtcgatttaagatagaatagctgctaagacaacgatttaacgatgagttatgctcactttcgttgaatggctggaaaaaatccgacaatactagggccctgacattctaattctaactcgctcgcactagaaatgtttggtagtgcaggaaacgctgactttaaagctgcttgcagctcctcgatataaaaacggatgttcttcaatattgtagacgtagtttagtacgatagatcgccaacgcatgtcaatcatcgactagaaagcaatcagacaaaagaaatattttctactgctactaccgtatatgccgtgctctgaaattcgagcttggtttaacgcgcaaggccccgacgaagagagcgaaagaaaacgtccccgccgaaatcggtgcttactattatgcaaggagctggcaccattctagcggggaccttatcagtttgttttcttgcagcgacaaccgatttattcttgcagtggcaaccgctccgttcttggcgcttgatactggcggttgattagctcaactttaactttgagttaggctgcgagatacgatcaccgggaaggatttgctcgttggtttagagcccttaatcgcatgccaaagttcgtgcaaagcacaatacatcgaatagcactgtaataaactacctgattaactctttaagttgcgttttgaaatcccgtaaaagaggccaaaaatggcaggctgtaacaggtactgcgtgttaatatgagcttaaaagctcgcctatcgagcgaggcttaggaaacgaagcgtctgtagcttttggaagcgtcaggcgtatgtttagcacaaggaagttgctaggtgtccacctaagcttaggccgatgacgaggacagcgatgcgcacgtcgacgcgaagccgttagcgtacgtgtaaacgtccagcacgagaccgctggtcggcacggtcaggtcgcagtcaggcgggttcagcgagatgatctccgtgatcatctcctggcacgcagtcgacgcgcacatgatcttgtactgcgcggtgttgggtagcgctgtggccgtgagcatggagtagcccgagtcacttgagcactgcgtgaagtacgacttgctgagaaggctcacgagcgcgacataggcggcggtctgctgggtactggtgcaggtcgtggcattgacggatccaacaagggcggcggcggcggcggcggcggcagcgaggacagcagtgaacttcatcctgaaaagtagggtgacttgtgtgtgggtgacttgtgattgacaagggaaatttcagaatggagagaactggggcgaagacgacatggagttctgggggccgaggttagatgccgcagtcctggtcatcgatgatcgatgcgtgcgatagattgagtgcatgcccagcatatccgattctgctcttggtcgacagtgctaggagcagtcgcccacagaggcaggataggacgagaacccacgaagcgaactcttacgatgaacctaactcggcgaatatccgaagtgctattccggacttgagtctgcgtattcagcttcgcgcacgtaaggtctccgacccaaaatccattttccattctatctagcaactgtttccagaacattaaactactgcagaactagtagtatgcaaggcaggtgcagggtaatggaaacaaaaaatcttcattcaaaaagccttataagtgctcgaaaacannnnnnnnnnnnnnnnnnnnnnnnnnnnnnnnnnnnnnnnnnnnnnnnnnnnnnnnnnnnnnnnnnnnnnnnnnnnnnnnnnnnnnnnnnnnnnnnnnnnggagcttaattttcacatagtatgtaagtcattcgtattaatacatgcattgcatatacgaatgacctccccccccccttaatttaacagcggcaaaacaaatattctcttcgagctgaagcaagcgatttgggacgactgcctgcaacaggggctgatccacccacacttgcatccacaatgaatccgccgagtgagacgcttgcgcgagtgaatcctggtctgcaagcgaacccgaactccccgggtttcctaactatccgagctgtaaggccgccaaagcagacaagttgcttccgtgccagctgtctaccgatgcgaatagaaaaacgcagggcggtgatcaacttggggcttcatgagtggcatggtatccttgatcgaacagcgcttctgggctgtagacgtccgagcatcgagctgttcgtcagtgcttcccgctcgccgtgtcgagatcagccgacgcgcccgccacaagcagctcctgcgctgtgagaccgggtacggctcgatgccttcggactgcgagccctctcacccagctcactgcctcattctgcaatttgctccgccacacgcacgacgtccaccccccccccttcatctccacccctcttacccaagatgaacttcactgctctgctcgccgccatcgccgctgccctcgtcggctccgccaacgccacggcctgcacggcgacccagcaaaccgccgcgtacaagacgctcgtcagcatcctgtccgagtcgtccttctcgcagtgttccaaggactcgggctactccatgctcacggccaaggccctgcccaccaacgcgcagtacaagctcatgtgcgcgtccacggcctgcaacaccatgatcaagaagatcgtggcgctcaacccgcccgactgcgacctgaccgttcccaccagcggcctcgtgctggacgtgtacacgtacgccaacggcttctcgaccaagtgcgcgtcgctctaagcgcgtcctccagctcgatggcggcggagagcgttgttggctgggaatattctacgtcttccctgtcaggagctgcttcttggtcgacgccatcaaccgaggactaagttgtgagtttccacacaaactgccgaagtatgtgaatgaaatgatatgagttttgttttctccgatgtgagatagcggtgtgattcatcgaggcgaagcgactcctgttcttagttattgccatcacagcatttccggaacgtgctgggcaatcagcccgctctagccaggaagccacagacggcctctggctgttgtccggttcgatagcacccagcgacaggcaggctcgattccggtgttgcgcccctccaagggaggatggctctacaattttgtgatgatcgcgtggtggagcatcccgactcgctccatcgaacagcgagagcgctaagcatacgcacttcgacattgtccacccgtggcggttggggcaaccgcgctgccctttcagcaggcggtctggtcctcgaggtgatctccgactggccccacctgtctttcttgctctatcctggtttcaacgcgactgcgcagctccagaatggcccgaaagcaggaaggaacagaactcgccgagcctgataaacggagagaaggaggaagatatgccaggcataccgccgctgcgacaggttgctcacgctccagacgcggtccaataccagtcagtgcttctaggactcgcaccaaggatacaccgttgtttgtctagtgcgggcgccctgggaggcctgactgggtcaacgactgccatccgccagctctgccatccttgctagcttccccattctgcaacttgcctcgtcaagcacaagcccccccccagcccaccgcaccgctttctccctcgaagatgaacttcgccgctctcctcgctgccaccgctgccgccctcgtcggatccgcctccgccacggcctgcacttccacccagcagaccgccgcctacgtcgcgctcgtgaacatcctctcggagtcttccttctcgacgtgcgcgagcgactcgggctacgccatgctcacggccacggcgctccccaccaccgcgcagtacaagatcatgtgcgcgtcgactgcgtgccaggagatgattaccgagatcatcgcgctgaacccgcctgactgcgacctgaccgtgcccacgagcggcctcgtgatcaacgtgtacgagtacgcgaacgactttgcctcgacgtgctcgtcgctgtcgtcgtcatcgtctgcttaggcgttgggcagtgctcgcttggtcgaccgcgccatcacaggacagtatgaagttgtccaggatcgagggtcgccgtcgcgtattatgaacgctaacagttgaattgaatggagtgatgtccccccgtaaatcttgttggctcgatggtgtctgctcttgtttggctctgcgacgcacagtctgcgtggcagcccgttcggctcgcatcgtgccgcgataacttttttaagactgataagtgagtagccttccaagggtggatagaggtctcgtgtcgccgctgcgtacagctttggggcaactagtcgctaaagtctgtgggctcgatcaccgaagaaagataccatcacttcaacttgaagtgcgctaaccaatcagatggggtcgtcggacctgagtgctgtaaggtatcctattctaccttggttgattttctgctggcgccttcacattttgaatcttgccaggtccacgccttgcgcacatgcacatgcacatgcacatgcatcataagctgtatgccatacagagcgctagtggtgaggtggggcatcatgcgacgcagccctgcaagcttttcagataacgaggcagttaaccttctataacattttttctttctctgttgaagagcaagacatagttgctggaattgcaacaacctgggcgttgtttgtggtgcccgtacagcgggtcggtagcagcgacgacgcgcattgttccagccgctgccggcagatttgccctggctcggtgaattaccgacggtgaacacagagcaacgcccacctggactctctacattggcaacgccctgccagctttcccagctaatctagcaacaggctgttgcgtgctgccgccgtaagtaggcagccaacttaccggtagctgcatccatgtttttccccctcggcaggacccacagttgacccaggtaacacgaaaactggggcgtcaaggtgttaggcaacggatcccttcaagcagcatccacgcatcgtggcgagacgggctcaaatactttgatgcttggccccacctcgtctacggcaaatggtgctgcttgagtcgtcttcactgaaggcttcagttcgtagagtggcatggatcctgtcagtcggcagcactgtttccagcagatcctcaatcaaagcagctcgagtgcgcggcgcagcaactcactgcgcgatgtcgtgaagcgcagcggctgcgggcaatgcaagaaactgccctggaacacacatccacgcggacagcgcgtggcatcctcgtcagcggtagatcactgctaccaaatggctgatatctatgaggcagtctgctgctccacaaccaagtcgaactcgagcacgaccatctacggtagatggtagattctaccgtattcgcactgcgcgctgtcgtctccttcgtgtccgcgaacaacatcctggcgactcgcgaaagaagcatgccagtgtctctgcgcagtggacgctcacagccaggccgagcggatcccgcgagacgcttctctcgtccatctacattgcatggaccagatgctcgcccctctcttggtctccgagcacggatacaagttgcacccgtacaacgccagtcaagttgtgcacctttcggcagtcgccgacagcggaaagcttcgccgttcgcacagccacggcaacacgttaacccatgcagccgcctccaagtcaacaggacacagtctaccgcagccaccgcactcgccattgtgcaatttgctctgtcacccacaccccactccaccccactccaccacctccaagatgaacttccgcgctctgttcgccgccaccgtcgccgcgctcgtcggctccacctcggccaccacgtgcacctcgtcgcagcagaccgccgcgtacgtggctttggtgagcatcctctcggactcgtccttcaaccagtgcgcgacgggctcgggctactcgatgctcacggccacggcgctgcccacgacggcgcagtacaagctcatgtgcgcgtccacggcgtgcaacaccatgatcaagaagatcgtggcgctcaacccgcccgactgcgacctgaccgtgcccacgagcggcctggtgctcaacgtctactcgtacgccaacggcttctcgtccacgtgcgcgtcgctgtaagcagccttagtcgcccgattcaagcgtctccatccacaagttgcaggcacgtacttctcttcagatcaactgcacggcttgagcaggtcaagtgtgtatgtagctaactgttttcgagcacttataaggctttttgaatgaagattttttgtttccattaccctgcacctgccttgcatactactagttctgcagtagtttaatgttctggaaacagttgctagatagaatggaaaatggattttgggtcggagaccttacgtgcgcgaagctgaatacgcagactcaagtccggaatagcacttcggatattcgccgagttaggttcatcgtaagagttcgcttcgtgggttctcgtcctatcctgcctctgtgggcgactgctcctagcactgtcgaccaagagcagaatcggatatgctgggcatgcactcaatctatcgcacgcatcgatcatcgatgaccaggactgcggcatctaacctcggcccgcagaactccacgtcgtcttcgccccagtgctctccattctgaaatttcccttgtcaatcacaagtcacccacacacaagtcaccctacttttcaggatgaagttcactgctgtcctcgctgccaccgccgccgccgtcgtcggatccgcctccgccacggcctgcacttccacccagcagaccgccgcctacgtcgcgctcgtgaacatcctctcggagtcttccttctcgacgtgcgcgagcgactcgggctacgccatgctcacggccacggcgctccccaccaccgcgcagtacaagatcatgtgcgcgtcgactgcgtgccaggagatgattaccgagatcatcgcgctgaacccgcctgactgcgacctgaccgtgcccacgagcggcctcgtgatcaacgtgtacgagtacgcgaacgactttgcctcgacgtgctcgtcgctgtcgtcgtcatcgtctgcttaggcgttgggcagtgctcgcttggtcgaccgcgccatcacaggacagtatgaagttgtccaggatcgagggtcgccgtcgcgtattatgaacgctaacagttgaattgaatggagtgatgtccccccgtaaatcttgttggctcgatggtgtctgctcttgtttggctctgcgacgcacagtctgcgtggcagcccgttcggctcgcatcgtgccgcgataacttttttaagactgataagtgagtagccttccaagggtggatagaggtctcgtgtcgccgctgcgtacagctttggggcaactagtcgctaaagtctgtgggctcgatcaccgaagaaagataccatcacttcaacttgaagtgcgctaaccaatcagatggggtcgtcggacctgagtgctgtaaggtatcctattctaccttggttgattttctgctggcgccttcacattttgaatcttgccaggtccacgccttgcgcacatgcacatgcacatgcacatgcatcataagctgtatgccatacagagcgctagtggtgaggtggggcatcatgcgacgcagccctgcaagcttttcagataacgaggcagttaaccttctataacattttttctttctctgttgaagagcaagacatagttgctggaattgcaacaacctgggcgttgtttgtggtgcccgtacagcgggtcggtagcagcgacgacgcgcattgttccagccgctgccggcagatttgccctggctcggtgaatcaccgacggtgaacacagagcaacgcccacctggactctctacattggcaacgccctgccagctttcccagctaatctagcaacaggctgttgcgtgctgccgccgtaagtaggcagccaacttaccggtagctgcatccatgtttttccccctcggcaggacccacagttgacccaggtaacacgaaaactggggcgtcaaggtgttaggcaacggatcccttcaagcagcatccacgcatcgtggcgagacgggctcaaatactttgatgcttggccccacctcgtctacggcaaatggtgctgcttgagtcgtcttcactgaaggcttcagttcgtagagtggcatggatcctgtcagtcggcagcactgtttccagcagatcctcaatcaaagcagctcgagtgcgcggcgcagcaactcactgcgcgatgtcgtgaagcgcagcggctgcgggcaatgcaagaaactgccctggaacacacatccacgcggacagcgcgtggcatcctcgtcagcggtagatcactgctaccaaatggctgatatctatgaggcagtctgctgctccacaaccaagtcgaactcgagcacgaccatctacggtagatggtagattctaccgtattcgcactgcgcgctgtcgtctccttcgtgtccgcgaacaacatcctggcgactcgcgaaagaagcatgccagtgtctctgcgcagtggacgctcacagccaggccgagcggatcccgcgagacgcttctctcgtccatctacattgcatggaccagatgctcgcccctctcttggtctccgagcacggatacaagttgcacccgtacaacgccagtcaagttgtgcacctttcggcagtcgccgacagcggaaagcttcgccgttcgcacagccacggcaacacgttaacccatgcagccgcctccaagtcaacaggacacagtctaccgcagccaccgcactcgccattgtgcaatttgctctgtcacccacaccccactccaccccactccaccacctccaagatgaacttccgcgctctgttcgccgccaccgtcgccgcgctcgtcggctccacctcggccaccacgtgcacctcgtcgcagcagaccgccgcgtacgtggctttggtgagcatcctctcggactcgtccttcaaccagtgcgcgacgggctcgggctactcgatgctcacggccacggcgctgcccacgacggcgcagtacaagctcatgtgcgcgtccacggcgtgcaacaccatgatcaagaagatcgtggcgctcaacccgcccgactgcgacctgaccgtgcccacgagcggcctggtgctcaacgtctactcgtacgccaacggcttctcgtccacgtgcgcgtcgctgtaagcagccttagtcgcccgattcaagcgtctccatccacaagttgcaggcacgtacttctcttcagatcaactgcacggcttgagcaggtcaagtgtgtatgtagctaactgttttcgagcacttataaggctttttgaatgatgatttttgtttccagttgactttaggttgccgttatttttagttgggtatcgttgttgtatgatatatttttatattagtatctaacaaaagcgttgcgttttcctcttcatttttaaacttctttttttaaaagaagtggcaaatagcattacaacatgttgtaacatcccccactcaaaatccgcagctctgttgagaacaaatgcgctaacgccccacagatcagcacccagaagcgactacgtatcaatagcagcagtgtatttacgtagtagaccaaggagttcatcgtacgcctttaatttcgaccactgaaatcgagagagatcttttgattgtcgcttcaagttgaagccgaccagatactgtacctaccggtagtcgatttttctcctgcgtatggttgaagtggccgcacgcgtttatggtctcaagtctctcagagtcaaaacttttgaatctgagagccattattttggtcagctaccggtagtttatcttaaagtactaaaaacaattcacataccactactacagtacgtgtaatagtatgccaaaccacccactcaaaaaaggtatctcctctggtcagtttttttcaagattgcattcggaactcgatgtgccgcatcaagcgtatttctagttgattaagcgaagtctctcaatcgactttcgaacggtaaaatcggcgcaagcaaagcctggtcttgggaccaaagcaggaagaattgatgaatctgaagagctatgtaagctcaccattctcccgcatgaatccaccctagcgatacccgcaaacttctagaaattgcacgatggactgctggtggggacgacggtaccagccgttgccggagcctcactggaaactgctggggtggaagtaggggtgttggtgctcgttggcgcttccgtaggtgcagtagtgggggccgtcgtcggagtttcggtgggcgcaaaagtcggaacggaagtaggggcttcggcaggctcggtagtaggggcatcagtcggagcggacgtagggttcggcaaggcgtcacagttcgactcaaagttgatcgcgagctggtagagtgtaggttgcggaagcaacagaggtaacataggttagagcagttgctgacgaaggcggtgttgcccgctgtcgcagttaggctatagttagaccgggagggactccgaagctagcaggctccagtcctgctcattcgcgaatttcctcgccgcagttaaaacctccaagcctgacgacttctcggacctcctgtcttgccccgaatggccccaagctatttttaccttcggccgggcgttttcaacctcgtgggcttctcgtacggcaaggtggacggcaccctcgcacgcgaagcgaaggtgaaggtcaagctggtgcagagtgggcgctggtcggaggagcccccgcaagctgtcgagcttccccaggaagagctggccccaagagtcgtgtcagtcgcagaagccgagaatggtgtcggtacgtttgtgggtggcgtcatctgcacgtcacgggtccgctccggaacagctcgggtctgggattacggcttagtgatcggatacagctgggaacctgagctgcaacatggcctgcttgatgtgaactttcgtggtgctgagacctcgttgaagttcgtatcggacactactcaggatgttgcagtcgagatttatgcgttacagccgtgtgccggacaaagcacgagcttcgtgatggcccgagagatgaggcaaatacacgacaaagtgtataacaagttcaatgggatcgaccaaccagcgatcagagatgctacacagctgctggagggggtccggagtgatgaacttgacgaggcccagattctccctctgcttgatattgggaattttgccatcgcagaggtctcagtccagcacatactcgactacgtctactacaaggacggtgggcggccgcacccatcggaggcaattttcggtgacaccatctttgacaaaccgatcgcgcagcaggaaccaagaacccttgctgccactgaggtcgtgcttagcgatggcttgagtgactctgacgacgatgccgccgaccctcctaccgctcacagtggtgtgagctcgactcagcaacgtgaaacgaagcgccggcgtctaaacgtacaagggcggacagctttgccagactcaattcactcggacacagtattacatggagtaggtggaaagtcgcagagtacgcgggatgtcgatcaactgatactcttggtgcagcggcagcgcgacgcgaagatggtagtggcgataaaaatcaatttcacgcgacgggcatgcagacgactattcacctgggcttagttgacggtaagtctccgtcaatgacggcgcagcggtttgtggagttcgttcaaattcattggcgaaagtttgtttttttccctcatcctgctgtcctgtgtgcgctatttggttgggatttcggtacgagaggactttcaattttacatttcggccgcgtgacagagctggagaagaggaaacgtgttcgagtttacgacatgagcaacttttccaaaaagaacagcctgcctcctgcgcaacctcctgctgattttactactctgattgggtgtgtcgacgccctgtgtgccattacccaactcctctacaagcccgtggttcacgagacgctgaaagccgcctccgacttcctcggcgagttgcgagtgagcgagttgatggcttcccaacaagctttgaccgaaattgcagcctgggtcgacgatcagctggaattgtttcggctagctattacggatgagaattggaaagctgtcgcggatatcaagacatatttctgtgcatcacacgacgcttttatccgggtgcatcaaatgattgtgcgtcaggatgtcatcgccgctgtaaagtcaactcactccagctccggtcggtcagagcatcacacacggggcggacgaaccagcaactcggacaagcgcattccgattccgcttgaagttcggcaggcgcttccaaaacaaggcaaccagcagatttgcctgagatttctatctgcccaaggctgccggagaaagaacggcaactgtgtaatcaagcatctttgccatttcaagccggcagcgctgccggaaaatgtacgcgacttccttaccaagaactacggaggcctttccgcagacatacagtgacggtgtcgggcacggaacgtaggacctactcgcaccccgagtgcatcggggtcaattaatcggcaacggtatatacacccacacgctgttcaaccaccattcaggtctatctttccgtgtcaaaacaccaccgggccgctcgatcgactcatgtcgatgagcccgcccacgatcgggccgttcggtcgactcatgtcgtcgaacccgtctacactcgggccgctcgcccgacccatgtcgctgggcccgtccaccctggggtcacccagccggtacaagccggcgggcccaccctcacttgaagcaatgagtcgcgcgaaagcgaaggcgacaaacagcagcctctcgacttcgtcggctgatgcaccatttccggccgctaactttattcggcggcgccaacgaaggttcgatactaccagcctcgcccgccgccggttagcagagctgcacgttgacactgctcggattaagctgattagcgcgctaagacgacaagccttatcaccaccacaaccaatggcgtcgacagcaacgcaacgggaccacacgaagtacctgcttgaccgaaacaaacagtccgtctacagtgagttcatacggcgctctggtatgcagctgcccgaatttgttcgaccgctgcgaggcgagactgagcatgacccccgccccaataaatcgctgatcgagccaacatccctatcagcatggcaaagttaccgctacaaaactcagtgggccgagattgtgcagcacggggtatgtccccggtggaaatcggggttcgcagtacaagacgcaccacccgcaaatcatgggtcggctgtacgagccctgaatatcattgttaaatgcctccgcaaagggcaggacgagaaccgctatctgattctcgatttggagctactgtcgatactgcatggtgtcacatgcagtccattcggggctgttcagaagggtgatgcggacctcactgttgatgctcgtctaattcacgatttgtcatttcctccgggcgcctcggtcaatggcaacactgttccggatcatgagattgacgtttgttatgacggccctgatgcattggccaatcgcattctggatgtggacgaggtcttcccaaaactacagcagatgatgactggagacgtgaatggagcgttcaggaacatcccggtgtccgctgacaacatcgaccggtttgcaggcacgatacccgagcttgggatcctggtcatcgacctgtgctgtccattcggctggtcaaactctccagtgtcatactgggtagctggtgctgctatttcgcacctttactcctgctcggcaccggaatggcctctacaacctacatctggaaagaacaacttcgatgccaagacgtggtgtgatggccacacagcgatcgagcctgatatagactctcggctagcggaagcccaactcgccttgcgaacagctatgatcgccgtattgggtcctgatgcagacatcgagaaaaagttcacgggctggtttaaggaagggcgcgccctcggtctagattggaacctgcactccaacacagtctctatgccccccgagaagatttcaaaagcgctttatcgtgtgcacgacatggcaacacgggcgaaaacgacccggacccagttgcaaaagctactaggaagtcttcgacacgttctcacgtgcgtcagagctgcgacgccattcttccagcgcgttgcagcactagctcgagctgctccgaggttcggaaccgtcgaggtatcgttcgaggcaaagggagatttgcagtggtttgaaatggtcattcgaatcggtaaattgaacgttgtcccgttgtctagattcacgcgtcgtcaggaaccaaactaccacatccagatggacgccagtgacaagggcctgtgcgctctgttcccgcttcgcaagcaatatctccaggttcagttcaccgatgccgagatcgacttgattcgtcagtgcaacgaagagggcgacagcacattctgcatcaacgtccgtgaactaatgagcgcagtgtttgcgtcgttagtgtggggctgtacatggaaagaccttacggacaatgaggaagctcacgtaaaattttggatcgagaacacgtccgcagtggcgtggagcaaccacaagacgagccgcaacctgttcgctcaaatgctcctccgtatattgggtatttgtgaagttcagcatggattctatactatggctgcccacgtcgctggggtggacaaccaaatggcggacgcaggaagcaggatatggcagtcgccggtgctcgcggccgagtttgctaacttatcgtctgattggacacaggtgcagataccagccgccttgcgcgatctctcgcgtctctgggagcgttattgcgagcaggtgccttagcacagtcgtcgagggagcagtattcacgtgggtgggcgcagtggactgcatggtgcactctgatgaactcgagtccatggctatcagcgactgacatcgacaaaaacgctgagcagcttggtgtctacgccgtgtatctctggaagtatggcatgaatcgaaaacacgctggaaacacctactcaactatctgcaccaagctgtgtgctgtgcggtggttccaccgcgactctgcaggttacgatccgggtgtaaacgcaagtcacgctatcctgctgcgaggtatccgccgcttcacggacccagatgttaagcagcagcccttgaccacgccgctgctccgcactatctttcagagcctcgatatatatcacagccacgtgatcaacttatctggggtgggctgcttttggggtacttctttctgttgagacgctccgagtatctcttcatcggaaagaaggttcacaactacatcttgcgactgtcggcaatccgcttcttcgaccgtgatgaaaacgtcgtctcgccgaagagggcacacgtcgtcggtataacacttcacggcgcaaagaataatctgtttgggcgagaggaggtgcggtaccatcacaagtccggggataaactgatatgcccggtacgagcagcacgctgggtgtacaaggcattatcgctgcggcgaggtggtatcacgtcggaggacgtctcgaagatcatcaagcacgcagcagcatcaaatggcttcgaaccgaatcgctactcaacacactccgttcgcatcggaggggctacggcattacttaacgctggcgctgatcgcctcgtcatcaagctcatggggcgttggctatccaatgcctttgaagactacccggtgttatcggcaaatggcacagtggatctcgctcggcaaatgtgctagtgcccgccatgcagccagcgaggcggcaattcatgtggggtagccgccacgccacgccctcaaggatggcacaatgacaagtccatcatttgccccaaaacgcgcgacagtgttggaaagtgtaggttgcggaagcaacagaggtaacataggttagagcagttgctgacgaaggcggtgttgcccgctgtcgcagttaggctatagttagaccgggagggactccgaagcaagcaggctccagtcctgctcattcgcgaatttcctcgccgcagttaacccgccacgccacgccctcaaggatggcacaatgacaagtccatcatttgccccaaaacgcgcgacggtgttggaaacgttcatgaccgcttggctcgtggggatgaccaggtcgcagtcgggcgggctcgtcgcgagcacacgcacgactagatcatgacagacttgcacgccacacagcgagatcatctgcgagttcgtgggggcggccgagtagtacagcatgttgtagcccgagttggtcgcgcagtcgctgacggtcgagcccgtaagcaagctgatcatgttgaggtacgcgcttcttgtctggtccaccgtgcagggcgtggtgctcacagagccgacgaaggcagcagcgatggcggcgaggagatggcagtaagtcttcatggtcttggaaggaagtagttgcgaagagcaaattgaggaatggtgaagacagttgagtcacgagtcgtgagtcatcgcggtcagttttcgaataagcaaagcatgttcacgtttgtaccgccatagagcctagtctctacaatagagactgcagtatgaccgtgggtgaaaacgcaagagtagtcctccggcgctggtgctcgccggtctctcactcctctacgatttactctgtacactagggatttcgtagatgtcggtcttcatggatcggtcgagtacagtattcatgtacaatactgaagcgccagcaattttaggcggcagcaccccgtgctgcagattactgtggctccgggatgcagcaggaagctccttcctggaaggaacaaagtttacttggtatgttgcgcctctgggacggcgttaccgcttgtcgcggtcctcctccgtcggggtcgtgtacttcggccgacaggtgaacaggcgcttcgcttgctggcgtagggcgatagaagataggaaggaagactttaacactctcacgaaaatgcaaagttgttgttgctttaacggagaaaatccacgactgagctctctcttcttacctgtgcgcggccggcagctaccccaccgacccgctccttaccaactgcaacctgcccttggggacgacacgccttcggcctccgagccaacgccgtactcgtgtcccccgtcctcgacgtccagccgccgaacgttccgtaccctccgctctgcaccgcgccatctttcagcagcagcagagtgggcctcccacttagactcgaaatgcttgcgcgccctggccttgccccgccagacgtcgcgcctcctcctgctccaacgcaccgtcgagcagcttgaggaaggctgtcagccgaggtctcagacgtaacccgggacacgctgcatcagtcactgcatcccaataacatttacggtgttcgtgtgacacccaccagtctccgttcggatgcatcaaaatactgcagttatgacacttgcttattagtgcggacacgcaccccgtgactttgccgctgcaagcgaatttacctcagaatttgaaaacttaatgatcgccgccgcaatattttttcaccctgactctttggaaaatcaacgttacagctccagctggtgtcccgagtcggaacggctcggaccgttccaactctgcgtgggcgacgatgagtgcctgagttcgtccacctgctgtggtcgcgggcgagaagtagtgggccgtgggtcgggttgtctcgaaggtggagacccgtgggccgctacccagaggtatcttggagggatgatgtgcctcgcagtgtcgtggcgggacttcggggacggatggcatgttgggcggctttgagggccgtcaaggtgaacggatcaagtctttgggaggggtgagcgggaacggagtcacccgaaggcactgaaacgcaaggatctggagaggtagagaggaagagttaggagtagaaggaaggtcagtcgtgaattttgcttaaaaggaccacacaggtcgtaaggaacacttattgcattttgcttagtgatctccttgctatttgtgccccataaacctataagcacaggcagcacttactacttcaatacagcggcggccggccccaaaccggtccgacaaagcgactcgcgacacgtggtggaggagcagggtagtgttaccgactgtggagtgaacagtgctgagagcctgtgcccggaagtgaacagagtcaagagccgagcgtctggaactggtgactggacgtgtgacccccctcctcgtgtttaaagtgtgccagggaaggacacaggagtccgcacacgagtacacgccgcgcgggaaaagcggcgtcgaggagcagtgagaggagcgatccaggccggtaggacaagggaacggtaacgtagacacaagagccaagtgtgcacggtcaagagcaagaggtcaagcgaacaaggaacagtaaactgagagtggacaaggaacggtaaactgagaagagaagatgccaggaggacaaggaggaagaggcggtaacgctgaggaagcagcacgccgccgggctgaacaagaagaaagagcgcgtgcagagcgcgccgaggcagagcgtaccgcgcgggccgaagcagagcgtgccgaaagacgtcggcagaggccctcgacaccgacttccgggacgccgatgatcgggatagcgccgccgctgtcccagcgaccgagggccccgccgccgcccagccaggctggagcgggcgcgccggacccggttgaagagggattgaggagtctggagcggtggaggaagacccctgagtatgctgaagagggagcgtccgtgtcggatgtgatgcgtgagctccgggaagatgaagaagacgaggactatgaagagaaggaggcggtcaagacggagaccgcgactggagtccagccggtgacctcggctggaatgaagacggagaccgtggcgaaggccaaggcggagtccgccgtgaagggcgagccggagccaccggtctcgagtccgatgggacggtcgagtgtggggtagccctacgctcagccgacggactatgggtacggctacgggatgtacgccgacgacgaggaagactaccacgacgcgatggaggagccggtcccgacgcagcgaggcccgagtgggttcatcacccgctacacgggtcccgaggcccgccgaacggatcgccctgcctttggatggagctggagcgctcaacatggttcggggaaggcccccgagtacgaaggatggagtgggagcggaagcgcggtgaagtcgccgatcaagtcgccccctccgatgaagaagttgcagttcgccggcggtccggctgggctctcgaagccgctcggtggcggaatgcccatgcaacctacaacgggcctacggcaagtcggacgcctggaacgggtacggctccgccggctccgacggctgcaccgtcgacgagttggcgcggtgccagtggactttcgccgagtgcctacaacctgtctacgatggtctcgcacgccgtgaaggtgctgccgatgttccattcagacacggccacggtggagaaggcgcgggacttctgggagctcttcgaggaccacacggacggtttccccgaccggtccagattgctggtgttccgtcagaagctgcgaggccgcgaggctgaccggtggtggaacaactcgaggatcaagtcgttcaggatgctcaaggtgcggttccataaccagttcctcagccggatggctgacgagctgtgggagctgctagagaacacgaagaggcagcgcggagagtccgtggaggagtggggtgaccgagtctcggacctgtgcgagtccctcgactacccgaatccgcagatgcggtaccagctcttccgccgaggactgcggaacaagcgcatgctggcgaccttggacgcgagtcccgcgtcggacattccggaggcgtgcgagtggctcatgttcgaggacatgcaccgtccgatcgaggaggacgacgagttctcggacagcgaatccaagaagaagaacaagaagtcggaggaggcccccgcgacgactgcggtcgaggccctcgctgagcagatgaagtcgttcatggagcagcaacaacagtggcaacagcaacttatgcagcgccagtggcagccgcctaggtcgcctcgcaatcgagcgccggtagtggccgccacccctgccactcagcccgctggaaacggtcgtgggccagggaacgctcagccattccggggcattcggatgggagatgatagtcgcacgcaggacggttcgcctgtgtgtggtcgctgtaacttcatgggacatggtcgcgctacatgcaagcgcgcgtcgatgggctgcaggcgctgtggcgcgtttggtcatatcgcggtcgagtgggacaggccccagaacggtggaggccagactgcagccgctgggggtactcaagctccgtctggttgtgttttctaccaagacgcgagccactccgtgatgcagtgccccgtgttggccgagcttcgtgatgcgactccgagtttgctgaacgcggccgcccagagcaatccgacccgtcgacagtggcgggggcgggaggaagcagaggagggagccactcctttctctagtctagaggatggctcagggggtgatcgtaggaggcaggcgagacgaaggcgttctgcggtcacggcgaggaaaacggtggacaaggttgtgaagagtagtgtgaatgaagggagcgtcgaagaggaacgcgtagaggcgccaagagcggaagtggaagttgagacggttgccggggcccgggaagagtggattgtacccagcggcgtctccgtcgaagaagaatatgaacgagagcaggggcggacggtattgtctgtgcgggaagaaggtgaagctgagtgttggacggagttgtctgtgcacggcgaaaatgaggaaagcgtggcggaagagcctgcatactgctacgaggaaaaagcggcgtgggccgttgcgagtgacgaggaggagaagatgtaccctgcggggaagacggcgaccgaggagagcgccgagcaggacgagccgagtgcaagggtgaacggggcgtgggcccatgatggggccgccctcgatggtaacgatgaagaggctaaggaggccgaggcggccaagctggacgcccccgcgggcgatggagaccccgcgagtggcccagaccgcagccccgagcgtggagtaggcaacgaagaggggacggcagcagagaccgtcgactcggcgtacgacgaggaccggtccgcgaggtcggaggagtcggcgtactccgaggaggaggaagtcgacggtgatgtgttctatgcggccagtgcggacgatgaagcgttctgtgctgcgcctccgagcgcgaacataccctacaaggtacccacggaggaggtgccgccgcctacggagttgagagcggtgccgaggtcagtgactgcggcccctttgcgaagcattctgaagaaggaaggcccccgtccgcgttggatgacggaggagccctccttcgaagggtggggcggcgctgtagatgtgggggacacactgttcgccgagtggaacgacgacggaggatcgccggccggcgagcacatcgccgagaagaacgtcaacgtagtcgtagggcccgagccggtggcagggcccgccaccgagttggctgtcgccgaggaggaccgaggcgctgccgccgagagcaaggaagtgcccgagagttccgaggtggtcgaggcggccaaggacgttaaggagccgccccgccacgctcgtctcttcacggacgaggagctggacgacatggagtgcgaggcgccgaaaccctccgttccaggcatcagtgaggagatcgaggagtatgacaaggagctggaggacaggctccaccccctcgatgaagtggagttgatgcgcaaggtgaaggagaatgcggagagggccaagggcccgtccatggaagagatgtcgaagtttctgggcgtcccggttgaggcgctgaccaagatgaaggacgcctcgcccgagggcacgtcctcgcccgagtactgggaggactggtacaggaacacactggagaactcggcggaggccaagcgagccaaccgtgacttcaaacagtcactggtcagctgcgtctctctagaacgctcgaccgaggagacaacgtatgagtcgttcggcctgtcggagtccgacctgggccagaaggcctcgaccgtctcggtcgatggctccgtgatggaggacagcgtgactgcgaacattgcggtccccgtggatgtctgtgaggagaacagcgaggagatggtcactgcggtaagcgtgaacccgcccgtggccgctcctgaaccgagttcgagcgcttctccgagcgagaggtcggaggctcgcaaggccgtgcacttcttgctgaaggagaccaaggacgagatgttgcgtgcgaagaagtcggtcgtcgacccgctcggagaaggcgtcacggtcgagatccccccgattcgtgataagccacctgatctagactgggtgcgcctcgtgcacgatgttgagcaagttgctggtgaaaatgaagaccaaatctactggcgagaacctgtgaagaaatggacgaacgagtactacaatgagaacgctacgtatatttggaataagctactagatcgagttcgagaagcccactcggcgagtgcgaagcgtcggctgcggcgtcgctcgcggcggcccgtatgctttgacttcacggcgttgtaccgcgattcggccgaggcgctggacggggagctccgtcctgaagaagacgacgacgcgacgcactacgtgcaagtggtccgtcccgagcgtccaccgccggagcgtggacggaagaccgggatggtggaggtggtaaccgtgaacttgccggacggcttcggcgtccgtgccgataaggatgatgatgagtgtggagccgagctcccacgcgtagttgccggtggtcggcgtgtggtgtgcactgtggggaacttcgaggcgctgtcgtgcgggtacatcgactgcctgccttcgcagatgttggcggacacgggcgcaacgctcagtctcgtcgacttccgtgttctgaagcgtctgggccgagctggtgaagctctggaggcctacgacgggcgggtacgcagttcgtctggacaccgtctgcgcattcgggggtggatcactctccccctaatgctgggcaaggtcgggatgaccatgcggatgctcgtggccgacaagttgcatgtggacactatcttgggcgtcgacgcgctgggcgcgttcggagcagtgattgacgtggccgagcggacgctcatgctgaagagcacgggcgaagtcttatcgttgggcgtgatggtggtccacgaatcgttcatggccacgatggccgtgtccgtccgcttgccgccaagggtccaggccctggtggtcacggatgtggtgggcgatgccccgaacgcgaccgtcctcgtcgagggctctctcaacttgccgccttcgctttgcgtggcgataacgctctgtactgtggacgacggtcgagtcgtcgtggaggtttgcaacgcatcgacaaaagagttctggatcaagaagggcacggtggtggcctcgacgattatcgcaagttgaacgccgtaacggtcaaagattgctatcctatgccgctgattgacgacatcctggacgtgctgagtggagccaaactgttctcgaccatggacatcgcctcaggctactggaacgtgcccatgcatgaagacagtattgctaaaacggctttcacatgcaaatacggtctattcgaatggttagtcatgccctttggcctatgcaatgctgtacctgctagcgaacggttgatggagaccgtgcttgtcgacctcaagtggcacgtgtgcttggtgtacttggacgactgcgtcatcttcagcgaggacttcccgtcgcacctcgttcgccttcggcaagtgctgacccgctttcaacaggccggcttcaaactgaagatgaagaaatgtcactggggcaggagtcaggtcgcctttctcgggcacattgtgacacccatgggcatcctcccgaaccccgagaaggtgaatgccgtcatgaacgtgcagaggccgcgcgctgtgcatgatatccgttcattttggggctgatgagctacttccgccggtatatcccggggtacgctctgatctctacgccgctggaacgcctgaaaatgaaagacactccgttcgtctggaatgaggactgtgaggtggcgttccgccagctgaatagggcgctagtcactcctcctatcctatcctacccggacatgaagaaacgattcaatctttacgtcgactcgtcgaggtatgctgtcggtgcttgtctaatgcaggtggtggacggtcgagaccgtgctgtcgcctatgctagcaagttactgacaggctctcagaagaactggatcagcaaccaagccggaatctctgaaattgaatgctggggaattgtctggtctacgcggaagttccgctgctacctagataagcgagagtttgatctctgcactgaccatcaggcgcttacctggatcttcagtcctggcaaccgcacgaccaatgctaagctcgctcgctgggcgatcgagctgtccaatctacaattccgagtgcatcacaagcccgggacgagcatggggcacgtggacggcttgtcgcgcctccctaccgcgagtgtgaacgcgctgaccatggcggacctgctgaacccggggggctcgcctgtgggcatggccgacttgctgaatccggacgattcgcccgagaccgtggccaacgactcagtcggggagccgtccgatcgagccgtggcttccgactcagtcggggagccgtccaacgtggcgcccgaaccgatgactagagacggcggcggcgagatgggcacggagaccgcggttccgttgccggaagccgctactgaggacgagtccgcgccgacggacgtccctccgtcgtccgtggacttgttcggactcgatatggagcagttgatggtggagcagcggaagatcccgtgggtgatggccctgatcgcgttcctgacgggtggagcgctgccgctggaccctagcttacgagtgaaggttgtgaggatcgcgtccaagttcgccgtcgagaacgaggtgttgatacgcagagtgaatctccccgcgcgcgtggggcccgctcgatcgcttaccgtgcccgtgataccgcttccgttcgttgaaacagtcttacatttttgtcacgctgatctactgtcgtcgcatctcggcctcacgaagacgctcgagaaggtgaggcgacacgcgtactggccagtgtggcgacaggacgtcgaggagtatttgcgcgaatgtgataagtgcggaagtggcaagggtgcgcgtccgtggcgcgctggtcgaatgcagagaatgcccatcgtggatctgacggggccgttctcgttgctcgtggtggacgccgtggggcctctgcccgaaaccgagcgtggcaatcgctatattttagttttcgttgattacttcactcgctgggccgaggcgttcgccgtggagcgcttggactccatgacgttcgtggaggtgacggtgaacggagtggtgtctcagcacggagtgccgtcgcggttgctgagcgacaacggctcgaactgcacgtctgaggtggccaagtccttctatcagacgttgggcattaagaatctctttggtgctgcctaccaccctcagactcaaggactcgtcgagagattcaacggaacgctcataggaatgctagtgaggctcaagatgattgggatatttatcttcctagagtgttttttgcctacaggacggcctaccacgaggccctgggagattcgccgtttttcgcgctgtacgggcgcgacccagtgcttccgatggacgtggccttcctcaatcttggaaagcagtgacggagtaatgaagtggctcagtataggcgagagctgtacagctctctccgttcctcacgacatttggttgagcgtcagttgttgaaggcgcaagatcggcacgagcagcgcctggaagggcaagtcgaattgaattatgaaataggagacccggtgtgggtctaccaggtgttcagggcgaaacgcggcgaagtgcgcacgaagaagcttgccttcgcttggcacggtccctatcggatcgtagccaaggtcggcgagaacgcttatcgggtcgacatcccgactcaccctaacaaaatggtgaccgtgaacgtgaataggctcaaaaggtatcgtggcaaatggacccggccttatatggatgaagtgcccgagggtctgggcactagtgatgaaaacgaagaagaggggccgttggaagaggccgacctccctgtgtcgagctacgcggaacggttgacactaggaaatgaggacactgttattgtgggcgtggaagcccccatcgtggaaatagtggcgaagatgaaggacggtcagggcgtgaagtacctgacgatgaccagctcgtatgaggtgttctggctgcccagggagactttgatgcccgagtatgcgtcgttggtgaccgcttttgagcaagcggataggaggaagaaggggttgccggagcttcgtcgaagtgcgcgtttggcggacgctaacgcccaagtcgatgatgactatttgctgctggcgtagttggtgatgttcttgagctgaagaacctgtgattgtggatatggatttacgagcagctcacgaatggtggatatgcatgtcaagttcatgtttttatttggttttacctgcaaaattagtgctgcggctgcactagactcgactacaacgaaatgaagaagataaacggagatccgaggtgtgcgcatgactcacttggccttgtcgacgcttgcgggacgcgacttgagcttcttcgtcggaggctcgctcgctacctcgccgtcgtcgtctgcttcgtcgcccggcagcgtctctttggccgcgacgggggccttggtggtcttgggttggaccttgtcgtccttgtcgctgtcgtcctaggccgccggcttcttcttgtcgtcgctggagtcttcggactcgcctgacttgctggagcgagaaaccggaactcctggcttggacggagtggtagctcgctgtttgacggcgggagcccggtactgcacggggggcgtcggaggcaacgccgtgaaggctccgtcctcgtcctcgaagtccgagtcatcgtcgccctgctcgtcggggttgaagggcttctggtcgtacacggccaccttcatgcccaagtccaggagctcgaccacctcctcgatggtgtctttgagcgacgcgtccgacaagagggccttccacgggccgcgggttcggttgaccacccaagaaggcacggggggtggcccgctggtgacgtcgagcttgatgcgagcgagggccttgtcggagagtcgcaggtgtagcgctcgcgtggggtcgatgagctccgcctcctcgaggagctccggaatcgaggcgtagccgtgttcgtcgacgatcttggggtcgagagctcgctcgatggcccgctcgtagagaatcttgtcctttccgaagacaacgccgaggtcctcgtgcgccgcgcccttgctcttagccgcgccggcagagtgcttggccgctctgcctcccaaccacatgagcgtgtcatgagcaccgttctcgaagtcgtcgagaaagccgaagtaccatcgctcctcgatgttgtagctaatgagctcgttccgcgctcggcacgcattcattttctccttgcgccgctggtcggcattcagacaaggcgcgtacagcgcccacaggaaaaacagctcgcggaagcgcatgttggcacggtagtggacgaggtgcaacttgggatactcggatggcggctaccagcaccgctgtttgcgccaggggtacgccaagcggaacggagcgaggcccttgctgaaggggcgctgcgcaagtgcggccaggtcgatcttcagtcgcgcgggcgccgtcgtcggcaaccggaagtcgtaggcctcggccttcttcttggccgcggccttctgtttcttcttcgatggcggtctcgtcttggaagacgtccgtggcgacgatctggttcctgtcgatggacgcggcggcggtgacgtcgactctggcgtgggcaccaacggcggcagcgggatcgacaggacggagtgctcggcaggctcgccggcctgcatctggtcggggtgcggcaggatcacgaggatcttgttcaggcggcgtgcgtcgccaccctacaggacgtccatggccatggcgtccaggacgtctagcccctgggacgcattgttgacggagagacgggtccggaggcgcgcccaaaactcgcgctgcgcgatgaagacgtccccctcgtcgtcgagctcgagggccatgtccaggctgcccacctggttgtcgaagtcggtgacgtcggagttggtcttcttaaccatgacggacgcgaggcgagggagagagcggagagatgcttggtgactgcggagtgcgcggcccggcgaaaattgcggattgaggcaactttcagtggggcggctacggcaacttctgcttaccacgtgacttcaagtgaattgacgaaatgtgactcaccttgtggatgactgcgaccgtctgagagaggcgcccaactggctggtcactttcgaagaacccgcgagcgacgctggcagtaacggggccttggctgccctgcgcctctgcaggttgatggtgaccgccaagggctgccgctagtggcgcgcgcggacggctcggacggcgtcaaagtggccgtcattatgaattagtgctgctggaacgatggagtgggcgacggaggtggtgaacggcctggcggcaatagtggtggtcgctgctgaggcagcttgtcaagttgcagtggagcgtcgctgggagctggcgtggctcactgctggagcagtgtcgtggacggttacgggccccctgcgaagcatcggctcacggatcgccgctgtgttcgtcgacttcgccctgaagtggagcgtgctggccaagttatacgtcatgcgctactgcaggtatgtccgtgggcctgccgtgcaaatgcagccgctccgaactcgcgtgtggaagtgttacgaggccctgctgaccaccccgttggttgtgctggagtccaagggcgagcatgaagacaggctggggaggttgctctacaagtggcttgacgccctccacgagtggtggtgcgtcttcttacctgagacttgcgcgtcgggacggaaggcgtgttccaagtactgcacgggcgcgagtctggagtctggccgttcggtcgccaaggtggtatggacgctgacgtccctgatcccgttctcggcgttctacgccgtgctgttcacctacgaagtcttcgagtggatctgccagggcgtggccggcgtgttcgctgtagtcgtggtctttgattgctggttcgcttccgaggagggcgagcatgcaatagtgactaactactggttgctggtggtgaatgtttgggttgcgctggtatgcataaccagtaagttgtggaggttgtacgaggcgtcggcgggcgagtgttcgccgctgactatggccacggagggctacgctgcgtggtgcgcggctctcgaggagcaggagcaggctgagcgtctaagtgaggcattttggaggatggacggcgggggaaatgcgccgagagtgcaggtgcggacgcgaagtggattgcaggccgaacggagggcctggcaagtaaggagagaagtggatcaagctgcgtgcgctcggcgaggacgccgagatgcagtcggggaggatgtcccgagtcggaacggctcggaccgttccaactctgcgtgggcgacgatgagtgcctgagttcgtccatctgctgtggtcacgggcgagaagtagtgggccgtgggtcgggttgtctcgaaggtggagacccgtgggccgctacccagaggtatcttggagggatgatgtgcctcgcagtgtcgtggcgggacttcggggacggatggcatgttgggcggctttgagggccgtcaaggtaaacggatcaagtctttgggaggggtgagcgggaacggagtcacccgaaggcactgaaacgcaaggatctggagaggtagagaggaagagttaggagtagaaggaaggtcagtcgtgaattttgcttaaaaggaccacacaggtcgtaaggaacacttattgcattttgcttagtgatctccttgctatttgtgccccataaacctataagcacaggcagcacttactactccaatacagcggcggccggccccaaaccggtccgacaaagcgactcgcgacactggccatgcgcctggactcacgagcatcttatcggaggcgagcgacccacgcatcgactgcgtgtctcgaagtgatcgccgagatcatatcgcggaacctacctgactgcgacttaactgggcttgcttgcagcctattatagcgatcaactgcacgagcgactctacatcgacgtgctcgttgatgtcggcgcctcgttacatgctcgattgatcggcaacaccatcgctggactgcatgaagagatcaagagtaagttccacaatagctgaatggtgcaactgtacatgtgtactagtacgctatcactctagtggagcgaggagatcgagatctcatacggtatgagtcataccgccactacagtagctcattgccaaatgagtatcgatcaccgaaaaaagatacgagtcgcatcaagttgaagtgagacaaccaatcagattcgatttccttcctgcggcgatacgaaagcacgttgggggggggcaaaggtggccgttcttgattaatgaggcgagcctcggtgagggtcatgtaatgagccgaggtgaggctgcctagggagtggtgtggtgggtgtcgaatcgaagcgcgggcgattgatcgagccgcagcgctcgtgtcttggccgccggaatgccgcttgtgtccgagcaggtgaaagcgcgactggccggtcgagacgatcaagaacgactacctatctataactactctgtgcgatgtggcggagtaaaaaccgctgggccctcagatccgaagttcctcggatccccgggtgaaaaaacataatttgcacctcgcttcgcttgatggaaataccgattttgggacggtacatgaacaatcctgtagatgtgaaatcatgtgaagcacaaaccgcaacgagctttcgaccttttagtcaatggggcagagaagattagtatttgctcttatctgccgagccggaagagcagaaccgctccttctcccctgctctactgtgcgctgtctatgatgctctcgctacttatcgatggcgatagtcgctaaccgcagatccgactgtactaacctacagccaccgagagtgcctgcttcggcgatgagcagctgtgtaggctactgtacccagccggtatcatctgcactgtagccggcggctgggttggctgcatccatcctttcaccccagttagcgcgaacatcgaggcgttacactccacgacaaaaagatatggacaccaccaaaagtggctgtaacttcgtcaatttttatcgttttaaggtgcggtttggactagagttgcagaacacgctgataaagatctgcacgttgctaacacgcgcgcttttgcgcttcttcaggtagctcacatacaaatcactggttctgcccaggtgacaaaacttatggacagctaatccccatacataatcctatattaaccaaaaacccttacaaatgatacgacttggactttgtatggggcgacaaaggaacccatgatttctccactctaccttagtactgagccatataatgccatcagatctttgtctaacgtcgcgagtatcgccgtcaggctggttcctttgtcgccccatacaaagtccaagtcgtatcatttgtaaggggtttggttaatataggattttatatggggattagctgtccataagttttgtcacctgggcagaaccagtgatttgtatgtgagctacctgaagaagcgcaaaagcgcgcgtgttagcaacgtgcagatctttatcagcgtgttctgcaacactagtccaaaccgcaccttaaaacgataaaaattgacgaagttacagccacttttggaggtccataactttttgtcgtggagtgtaggcaacggatcccttcaagcagcaacgtcgtatatattgtgtcgaggcagtctcacgagtgatcaaatgtgttgacccaaagctgccggtatccactcctaaagacgtgcgcggtgctcgtctccagccagtacaagtagggtgagaaatggtgtagagtggcatgtatcctgtcagttcgcggcactgcttccagcagatcctcaggcaaaaggtactttaggtacatgtaatgaacttgtccgcgctcatgccgtgaagcgcagcggctgcgggcaatgcaagaaactgacctgggacacccatccccgcgggcagcgcgtggcctcctcgccagcgtagatccctgcagtcaaatagtcgccatctatgcatgaggcagtctgctgctccacaaccaggttgaactcgagatgctggcaagatgaccatcgtggactgtacagtacacgtattcgcactgcgcgttgtcgtctccgtattcgcattgcgcgttgtcgtctccttcgtgtccgcgaacaacatcctggcgactcgcgaaagaagcatgccagtgtctctgcgcagtggacgctcacagccaggccgagcggatcccgcgagacgcttctctcgtccatctacattgcatggaccagatgctcgcccctctcttggtctccgagcacggatacaagttgcacccgtacaacgccagtcaagttgtgcacctttcggcagtcgccgacagcggaaagcttcgccgttcgcacagccacggcaacacgttaacccatgcagccgcctccgagtcaacaggacacagtctaccgcagccaccgcactcgccattgtgcaatttgctctgtcacccacaccccactccaccccactccaccacctccaagatgaacttccgcgctctgttcgccgccaccgtcgccgcgctcgtcggctccacctcggccaccacgtgcacctcgtcgcagcagaccgccgcgtacgtggctttggtgagcatcctctcggactcgtccttcaaccagtgcgcgacggactcgggctactcgatgctcacggccacggcgctgcccacgacggcgcagtacaagctcatgtgcgcgtccacggcgtgcaacaccatgatcaccaagatcgtgtcgctgaacccgcccgactgcgagctgaccgtgcccacgagcggcctggtgctcaacgtctactcgtacgccaacggcttctcgtccacgtgcgcgtcgctgtaagcagcctcagtcgccaagatgtatcgttttcacttaaacgactcggtaaagagctggtatcagacgtataaccgtttgctgtttgggcctttataaggctatttgaaagaatatttttgtttagttatcgcgtgatttctactccatgtaacttacatgtcatttcgagatggtacgtgtcgagttgccgtagtactaatagcttgtttgtttcagattctgcttcgtttttgtggcgtagaggaaaacttggggccatagatgtttgaacataccggtagcggattggtatcactccttggttaggatattggttaacagtgttgcaaggcactctacctgaaacagtcgctacgtgtactcaccatagtcttttagtggtagctagtctgtccttcagagtacccaccagggcaaccagtagctagataacagtgttaacccgattccaagcagcagtttgggcagaatggtgggacaatggtccaaaggtagacaacaggccttgcaccacggcgcgaaactgcttcatgatggatcccgtcagcatgcatggaccatgtcatggagtgtagcgtctgatgcaagttgcagagggtaggattgatcctctcaagtaagttagtcaacgagtgtactgagacgggggaacggatacatgtacatgtaccaagcccgtccagttgactttcaatctatccatggtgcagcggtgtggttgatcatcaagcgttgatggcgctctatggcgagcagacgcttagtccagacctgttcggtggcgaggaaatgcggtcacaacagcaagtagctgtgggattcgggcctgtgaagcaggagtagaatacgctacaagcggtcagacgccgccaactgaagagaatcacgtcactcatagatattgcgaggccgcaagcgtttacgttgagccgatactttgaaccatcgagttgaggggcgattattacagtgaaaccttgccactggcactggcaggctgccagttaagtcacaggctcacactccactgccccgccccactcgtccattctgcaatttgccttgtcatccatactccaccactctccaccaagatgaagttcaccgccgttctcgccgcgaccgtcgccgctcttgttggctccgtcaacgccacgacctgcacgacgacccagcagaccgccgcctacgtcgctctcgtgagcatcctgtccaagtcgtccttcacgcagtgctccaaggactcgggctactccatgctgacggccacctcgctgcccaccaccgctcagtacaaactcatgtgcgcgtccaccgcgtgcgagagcatgatcgagaccatcatctcgctcaacccgcccaactgcgagctgacggtgccgacgagcggcctggtgctcaacgtgtacgagtacgccaacggcttctcttcgacctgcgcgtcgctgacggcgaccactgctcccccgaccacggcccccgcagctacggacggctcggcctcgaactcgaccgtcgtgggcgcttaagcgcaggtgtttatccaaccgagcgagcttctcctttgaacgtacatacattgtagtcgccaggtgagcctaagtgacatcaatataccacattttcgtcgttagtgtatcgatgatagtgaattcttctaaaacccgcggagtggaatcataccaatgctagaaacttgaccccaaggcgatgatctcatgcggattggcagtcgaaagcgagcgtctttagccgattcagcacccgtttcgcgacggcaacgcgtgctggcaagcagttcagtcgtgaatttccagtcgaagacgtaggctgcagtttctcgttggccgtcgtaggaagccaacggtaggattccgtagtaaggtttcgtccgcgcaacccgttggggaaccggaagaaagccaatcgagcgctggcgttctggtcggcgctggcttcagtatgggagtcctctccaaggcgtcactctatgcgatatccaccaaggcgaaagtctagccagcaagtactccgctccactggagcgatcatcaccgacagtagctgctcgttcctatttcgcttctcgaggcctgcattagctcatgcgaagccaacgcgcctcaaatatctttcgtgcgggcatcgcccgttgactcagtgagtgagtggcaggcagtccagctgagacgtcaagtcgtatcacttccgttcgtgggcgtccatgctgaacgcagcaccggggactactggcccagcagcgccgcagtctgagcgcagcaacgacttaaccttcgaatcaacgggagcaccaacgaacgcgctcgccacaccagacaacacgcgaccatcaaactcctcgttacatgcacgcgccgcgctgtcgctcttgatgaccgtcgcggacaggtttcgtcatccaacccccccccccccctacaaaaagtaaaaaaatggcctgctaaaaaatattttttcaatcaaaattcgtcgcaaatccaaccgtcgccatcactttagtctacgaaaataggagaaagatgatcgaggaggaggagtggtccaaggagctggaggccaaccgcaagcccggccagaagcaccccacgccgtcgcccgtacgtctggcgcctggccatgcctggccgtgcttggccgtcgcctggccgccgcctggccgcgctcgccgtcgctataatatatattctaacatgttattattttttattgtcctgtgctggcgcagggtttcgcggaccgcgtgttctacgagagtctgctgcagcagcggcccgacagccgcatggcgcagaagtggtgcctcgagtacggcgtgctcaagtgggcggaggccgaggcgctctgcaagaagctgggcgtgtccatcgtacgcagcagatatggcgtcatttttttcttatatattggggtagacctaattatttcttaaacgtttattggctggggcagaacgtgacgcggccggccaagtcgcccaagctcaagaagcagcagaagagcgcgggaggacgcgcgagccgagtgcaggacgagtcggcagcggccgaggccatggagatctcgggcgccggcttcgaaggcgtcggcctgggcgcgctctaagaggagagaaggagaggccacagtgtacgagtaatacagagagagcaagtgagagcaagtgagagcacaggttgcggcctgcaggcgcctcatgggcggagaaatgtttgacgctgtcaagagcggccgacaatttctgtgacttaaggcgtcacgggagtcacgtccaagccggtgatctgcttgcacgcggtctacagcaaccaggtgactctgtctggcctgtgtctgttttgcgtaggactaagctcgacggaggaactggagctggggtgaagctggggtggtccttgaaagcaggtgaagtttttccacgaggttttgttcttcttgttcatgttccgtcgtcacgaagccgagagcggaagacaatgaggcaaagtgcgtcgccgccgcgaacgcagacccgagcaccggcttggcgacgccggctgatgattcttgtcgatcgcggtccaaagtgcttgaagaatttcgtgtcgttcagaaggacggaaaactttcccgggggaagtgactgaacatggtttgctttggaagaagccacatgaatcgctacgtacaagtcgggcggagtggtggcgcctctacctgcactcacttgagcatgaccctcgttcgcgttccatggttgcttacactgcaacgcagcgactcacgctcacttacggtgctcgagtagcagctgcttggtgttgatatacttcggttgctagagcagggtacgaggatcgccctgtccgaggcaactcgggtgcaacgtccccccgacttgggcctgccaaatccgccacctcggcctcatttgttccatcttcgacgtcgagtctgccggtgtcgcctcgatcggcgtgacctacgggtccacgaggtctgctatcgtctgaacgcatacgcttttgatctgctttctgctcttgtggactccttccattattgtgattttcgcctctcgactaagaattcgtttctatgggcgacttgccggttcgtgtttgagagcgcgttggtagcattagcacaagtcggatcggccagacgaggcccctgatcttcatacactcgggaagtatacagtactttactacgtggagatcaccttagtactacctgcaactcgagtataccaccacttcaccaggccggcagccaggctagctagcatttagtgccgctagccgatgggttgcgaacttctcgttgcgtcggacgcgaccggccggccggtcgatatcccatgaatgggtcgctcgagtcgctcgtaagcgcggtgatagtgcgccgttgaatcagctcgcgagagtatcgaccaccaaattctccgttatcggcgccctgacgccagcccgctacgtagcggctcgaccaaacgctcgcgctgaacgcgcgatccgccaagcggactcagcgagagggacaggcctcccgctgttgtccacccagagccccgtcttcaatgccctttgggtagtcgagctgagactgaaattaccgcgactggctcctcgtgctgactaccacccgcaagtcggaacgaacgggcggacgggctcaacgtgtcagcgcggcttccacacaattgcgcgtgccggtggagaccccttcctcgaggcaggtttaacgttgaccggcatttcagtgcgacgacgcggcgcccggcttccgtgcgagttccgtcgaaagacagcggcgacgcgtgcgtcacgttcggcacagtttggcgaccaaacccaggggaaggctggaaagacgtaccagggggaagagtggcgtagacggccctgcggttaccgctgagcgccatgccaagcgggccgcgctccaggttcttccatcttccagcgagcagttgcattgttcctcggtctgtccccactcctcctcacgcatgtcgcgccgcgccaccgttcttagcctcgcctccaaatccaccggccaagtggcccacccactttcgaatttgccgtggcagatcaacaccaagaagacgcgcggtctcctctggtagttccagcgtccacccacccactcgaccacagcttccgagtccctccctctttcttacgatggccagccccttaccttcggtgcactcgatcgcactgcccacggcgtcgttcccgtccttgcccagcatggcgcgccacaagagcagctcgctggcagcgtcctacgcgtcgtacgtcgtgcgcgtccacaccagacacggcatcaagaccttgtccttcgacgtgctggccgagctcttcacctgcacggccaagaaagccgccgaggacctcggcatcagcagccgcacgctcatccgcgtctgccgctcgctcggcatccggcgctggccctacctgggcttccgcagcgagaagaacgtcgagcggatccgccaggaagccatggagaacctgcgacgcaagctcgagaaggagggcgagtcgctgcctactgcggtgctgcaccccaacgcgtccagtctccgcggcgccagcgccaagcgtctgctgcaggtgaagatgccgcagatcggtctgcagtcgattgcaacacactccaagctgtcggcggtgcggtccggatcctggtgctcgtcccccacgctctcgaacgccaccacgaccatctccgacgacgacgaacgtatgtccgacgtcgatgaaaatgacttcatgacacacgcagcgccgatggcagcgcaatcgacggccgcgatcccgcctccgttctctccggcagcgccgctcatgacgcccccgtctaccatgcacagctttaacctcgacctgcagcgcgtgagccccaacaaagagaccagctttgccttctcgacgaacgcgcgcctcaaaacctgcgactcgtggacaccgccaagcatcgctgctgcggctgctcctgctccgacaagcgtaccgtcagcgtcagcgccacccatgccatcattgaacctgcttgtcgacgcctccctcctcacagccttcaagcgtgacatgacgtcgcaactcacgccaactcaggaggtccagcgcagcactcgcaccatgtcgatgcaggacatcttgacgctgcggcaataagtgtaggtagtgtcagttagccagcccaccgtccccttcgtatcacgtagcccttgtctgttaaaaaaatcgaaaacgtaaattacacccttcagttgccccgcgcccatggttccagttcacagctcgccacctctgtattctacgaatacgcgcgacttccgccccctgtaccaggcgggcactggtagtcctgcggcagcatgtagttctgcagcgcgctgaagcagtactgcgccttgccaatgttcttgcgagcgttttcgcgtcgaacgccgtacgtgcggagtagcttggtgaaggcccccatgtcgtcggccaccagtccatgcgaacgcaccagcaagttggcttcctcgagggtgattgacatggaagtccggtccttggccgatttgcacattgtcacacgcccgccgccaacgcagcgcgcaatggatgacgacaggctcagaatcgacatccgcttggaccggcccgagagctggatgcttaccgtgagcgccgtgagggaggcctggatgcggtcgaggtcctcggcatcgtaaatcggagcgggggccttgtcgcgacgctgcttcttgaggcaccagtcggcgaacttgttgacgtaggcttccagctggacgacgtactccatattgatctccttctggagagaagccttgcccacggtgttcgcgaccgtctgcatctcgttcagtccctgcgagaagatcaccggcaccactcggatgggcttctggaatagaaacttggcccgcatcttctgctccggcgtcgatagagacaagtaaatggcgcctgaaactgcgtcctggcccgggacgcggtgcatacttcgatccggaaactcgctggcgcgacgcgtgatgataggaagctcgatgacgatacccgaggggccagacgtgatggagacgcggaaagcagcagcgcgcggggacttcacaggcctcagcttgatgtgaaccctcccaagctccttgactgctgcctccgtatcgccaagcattccaagctcgttgccatacgtagataaaagactttcaaccgaaaacaggaagccaaccctcgtgagcatctccaggtagtcgatgccgcaagcttttagagggtaaggcccaaagtcccggtggtcgtgcgtgtgcacgtacagcgtctgctggaagcacgtgaccagcgcactcatcgcctggcaaaatgcgacttcaaggcggcgctctacgtcccacttgagctcgttgtacttgcgttccaacgcgtccatcgtaaggtccgagctcgcctgggcttccttcactaagcgcgcatgaagcctctccagctcttcacgcatctgccgcaccccgccactcttgaacccgtacacgtgcgccgcaaaggctccaactgtggttgtaccgtacatcctgtgtttgtaaaagggagggcgggatctagcgttcgtatcaatcgacattgatgctttcctcagctggacacttgactgtgagttctctggtgatccatcactgctcgggggtactgagatcttcagttcatcgatatacgaaccgaacggagttagatcagcgacgacgtccatgacatccgaagagtcgacgttatcgtccagtccgtagatgctctggaactcctcctcggtgatccccatcgccacgagagtttctgccagcttccgctgctccgatggaacagccacatcctggccagcagctcccttgttgacaatcgtctcggcagaatcaaacgaaatcacgcgccgacgtagcgcctcgacaggttccagcggcaattcaccgggaggcggagatgaagcgacttcatcttcgtcattgatatcgtcgtcgataaactgcacggaatcgagatcggtctgtcgtccattcacgctggattctcccgacacgtgcaatggcgaagacatgagcgcgccaacgaacgagttcacgaggcgagcgtagcgcgcagcacttgtctcgtcgccataccggacgtcgttttccgacgtgggagctgcattgccgaccgtcatcagctgctgatggaggttaagcgccaggaagcgaagatcggcgtctgctttcatcgtgctgggcttgaacgtgagccccgcgtgctgggtggctccgtaccgcaaaatcgagtcttccacttcggaaatgtactgctccattgtcttgaccagatccaagcgccactttcgcttcttacgttcaataacatcgtcttgaatctggatgatcatctcggagagcataccgatgctggttgccggtctaatgcggttctcatgttgataggaggagctcaatgctgaggctgcggacggcaacgactcggagtcttctgaggaatgggctgtgtggcccatttcattttcttgcacggtgccaagggcccttggtgaggcggggatcaccgaggggagtgaataaccaccgacgctaggagtcgatagttgacttgaaggggttgacgatgaactatcatcgccatcgtcgagcgcaatctcgcgtttgagtatatcgagcttcaccagtaaatccgacaggatcaactgcagcaattggtacgggacttcccacgtgtacacactctcgatcagctcttcttccaccagcatcttgccttgtgagcgttgggaggttgacgcaaggtgaatcatttgctgagctatctcggagtatcccgaatcatcgggagttgttgaggcatcctcggcgcctgtgttcttgattccaatatacatgaatgatcgtgtaatacgttccagcccgtcggtggacattccagcatgtagccccttcacctccgcctcacaacgaataacaatttctccagaagactgcgttcgagacaacggggaatacaacgagaagatggatgcgcgtccgattgctggagctgaacctgtcataaacgacgacaacgggacgagcgggtcgcccacgagccactggctgtcaagatcgtccagcgagttcgggttgcggaccgagtacaccgacgcgcgtagcagatcgtgttcgcgcatttcaacggccagcatcatgtggaagcacgggtcctccgagtgcgagacctcggtgcggccaacctcagccatcaccgctcctgtctccgcgttcatcaaatgcagcacaacgaacgacgaggacctcacggacgacttggacggcagcgtcaggttgaagcactggaacgacagccacgcgcacggcactgtcgaagcagcctgcgcgggccatttcgagtggtagccccatgatccgtccgaaacagtcagctgcgttgcctgtctttcgtagtcctgcatctctgttggtgatccggcgctgctggttgaatcgagtcgagccgacctgtccatcggctgctgctccttgtgtccaccacctaaatgctgtcgaaccacgagcgctagtcgccgcttggcgcggtccagcacgccgttgcccagacccagcgagagcggactcggacgacggcctagcgtcaagtagccgcccggtggcgagttgggctgcgtgactgcgtggctcgaggcagctccgatgccgtccgcgaacttcttggccgccaccaacagcgggcgtggcagcacttcgtggtccagcagcggcgtggactcggacgtgacgcggccgccgttgtagctgaggctgcggcgcgacgggatctcgagcgtgggctcgacctcccacatgagcacgaggaacagcacgcacggcacgatctccgggatggcgtagcccaccacgacgcacacgtcggcgctgtggatgtcgccgcagccctggtgcgagaagggccgctggatgtagatgatggtgcgcagcaggaagagcgccgagcacgcgcccatgacgaggatcgtgaagcgcagcgcgcgcgtgagcttcttctccaccttctcgtccaggcggcggcgcaggccgtcgcccgagggccgcagcacgcgctccacgcgctggcacatctgccacgtcgagtagagcagcccgagcgagctgacgaagctgccggcggccacgaagagcacgggtagcacgcccgtccagagcgcggagaggtcgagccgcgcgcgcgcgtgctgggcctcggccaccttggcctcgtgcagcagcgagagccccagcacggcggcgtagaaggcgccgttggccacgatgaaggccacccagatgcggcgcgagcggcgcgagaccttggggttggcgatgtcgatccagaagagcgtctggaacagcacgaggctgaagaacaggcacagcgccgcgcggttcagcaggttgcgcggcacgccctgcgccacgaaggacgcgccgcgcgccagcgcgaaggccaccatgagccgctggaacgtgctgcgctggaaggccgaggcgcgcgcgctcagcgacagcgcgcggcaggcggccacgagcgccagcgtcaggtacagcgccacgcacagcagctcgagcgccggcgaggcctgcggcaggaagaccaggccgtcgtccggcacagcggcggcggcggcgtcattaggggcgggagcgggcgtggacggcattgcggcgcatgggcggcgcgcctacggggcgcgagcggcgggacggagagacgggggccttgaagcgccggacagcgcggcgggatagtgaagtaagtgatggatgaccggctggccggctgctgtatcccggttgtagaaaaaacactagggttatgtgaatagcaggttagtttgctgtatttttgctgtgatttagcgcgattatgcgcggtgagtcagcgcgacgtgacaacttcaacgtgcacttttttggatacgctccatcgcaacgatcgcccgccctacggctttggtttggtcttattaggcttctgtttcttgagcagcgccttctccaaggcgctctgggcgccgctgggtttgggcttctccgcagtcacggggcgagatacgggagcagcaggagcagcgtcggctgcaccttcgccatcagcaggcgcctcctgcttcctctgcggcggtcggaacggcggcggctgcttcgtgagcagcatgtacgcgccgaagggcttggcctcctccgccttcggagaggatttgggggctgggtccgcaggcttgggctcgtcagtggtagtggcagcggtggcagctctgctctcgaccaagttactgctaccgcctgcttcgagctcgaccgtgacgacaggcgccaccttgtctccgcctcgctcctcaccagcagcagcaactgattcaacgggctttttatcttcctcttcgctgttagcggtgcttggtgcagtagtcactggctcggttggctgcggtaacactgcagtctccgctcttgctgttgccgtgttccctcgagagactacagctctcttgctgaccacagtcttcagagcgcgcttggcaggagacgtcgatgtcttcggccgcggacctgcatccagctctacggcggttctagcggtcgtgggggcatcgtaaccctccaccgcagcttcatcccgctgccgcttctcggactgcaacctcgcctggtgtttcttcttcaggacggactcaagcgcgcgcttcttgggcgacaatttgcggttctgccagaagacgtaggtgcccgtaggctgatcgcctactgtggccgcttcatcttccgcctgcaactcgtcgccctcgtcgattgaccccgccctcgcattcttaccacgctgcatcaaaggcggcagcttcccgctcaccttccgcatcaacttgtgtgcgagcgattcgcgacggtctcgcagctcgcgcagcagattctggcgcttgaccagcagctcggctcgcgggtccgcacgaggaccgaagcgatcggacgaactcacgagcttctcgtcgtcgatccgcttcgctttaggctgttcagcgacttcagcttcttgcgtctgtagctgctggtgatacacgcgcacgcagtgcatgccgtacaagaagtgttcaaagtccacaagatccgcataggccggatcgaagtcttccagcagttcacggactttcgtagctggcacgtgcacgcccagatcataaacggcctgcgcgatggccgtgtgtgacaccaagccaagctgcgccgcgtctgcggatgcgaacaacaagcggaaggcatcgatctcttcctcgctgaagtgggtcagcgtcttgcgcagcgtctcgcgcctccgaactgcaagtaaacgatgttgctcctgcttgtgcgcccgaagctgacgcaggtagcgagcgcgtgtaaccttcgtcagcaggcggcgttggatgcgcacagcagcagcataacgcaagcgatcgtacagagtcagcgacttacccagttgctcgcgctccaatgctctcgcgtcttgcggcccgatacgcagcagagcgcggcctcgacggatgatccttgcaattagagtgcgcgaccaccagtcacgcagcgtgcgcgctacgatagacgcgaaaatcacgacgggctccactacgagctcctgaatagcgacacccacggcccaggccaacacgcagtgacacgacgtggccaagcccagctccatcgcactgatcgccacgacattggccatgattgctagccataccagacaaatggagaacaccacgtacactatcgatgccgggtacggcacactctcgctgtcatcaccaccgacaccgaccgaatcggcaagagccacaccgtcatcaacgccacggtctacctcgttggacagtgcgctggagataacaacctgttcgtgtttcaaaggtgctgcggccagttcacttgcaactgtaggcgccacgctatccagactcgaagccaacaactgcgagcgcagcttgccccgagctggtacggcgattttgagcccgacgaccgtctcaaatgtttcgcgcacgtctcgcttgacttcgtcctcgttggcgccagagtctggcactcgcagcttcagtttagcgtccttggaaatcgccagctcgcgcgcgagaaagagtgaggtgaccaccatcaggaacagcagccctgcagcggtaagcgcgcagtacgtcgccacgtccgcacctcgctggaagcgcgcgagcatccctgcgcggcaccctggcaaggtggtgaactcatctttcgtctcagtcacgacagcgccgctcacactcaatgcttcgtaagtgacctccacgggatcgccttcaggacacggaagaaacggcgcgtctgtagcgctccagaacccacagcagcgtagttcctgctgcgctgtgtccttggcgtagcccgtgagttcctctttccacgccgtctcgagtcgctccgccacgctaaagcccgtagtgcggacactccagctattgagggcgctcgcgtcgtcctgaaccacctcgtgaatcataaacaccgcgagaagcaccgcgcccaacgctagaacagcagcgatcgccacgatcacaagcatcacaatcactggggtcatcttgcgacgaagcgggcgcttaatctgctgctcacgtaaatcgttggctagtgccgcgagcagtgagacgacgatgagtgcgaccgcaagcgctagcagctccagaacatcttcatcaagtggtacaccatacagggagttgttgtagcccaaccgtagtaatccaagcagtgttgcaagcgcgcagcctcccaggaacaaaaccaccccacaggtctggaacgccaaggcgacaaagcgagtgagccacacgaaccagcgctcctcggtcgtggtttgcgtcgcgccaagcgtcgaagtctctcctgcgacgatcgactgctccatgaccttggctgactcctgcgtctcggcgcgacgccgtcggaaccatggcccacggaagagcagcaccttctccttccgctgtctagcagtagcaacctccttggtttcatcgtcggcacggtgccgcacatgctcgaacaacgcgacagtcacagtctgcacggcgattccgacagcgcctccatacactagcccaaagcccagtagttcgcctgcacctggctgctcgcacgacttcaacgacgtccggtagcatccttttgtggcgtaatagcctgcatacaccgcgagcgacgccgcccaagcacaaagcacgctcactgcacgctgagcgcgcgtgaggcgcgcgtcaaacctcgcaccaactgaaaccagcacgtgctgccgccggaaatcgcgtctgaaactccccgcaacatagcgcagccggctttccaaagcgaaccacgcttctgcctcgtagttgcggacgtcacgaaggacgagagcgccgaggaagaacaacacgatctccatcagcgcaagtgctagtaagaaggcaaacagccacgtaaacgaggactcaactcccgtcacgaggggtcccttgcagccacgcgagatcgttagggaacagcccgggtagccaagcgctggtcgatcaaacacgatgccttggccagctaccagcacggggtcattaaacccgcagcatgagaactcgagcgcgatcgtattctgtgtggagggcgtcagtaagctccattgttcatctaggaagtctgtcagctgcgcgtgccaagttgcgtccgacgctgacgagtaatgcgacagataagctgtgaaccccacacccgcaaacactgcggcagctagtaccagccgagcaacgcactgcaagaacatttgatgcacgctgaagcgaagggcggctcgagttgaatacgcatgggtgagtagagccagcacgccgtacagcatcaacaccgagcccattgaccgagcaaccaccatttggaaggcgctggagctgaagagtgtccacccgacagccacgtccaagcccaggatgaagcacaccaacgcagctaaagtccctaccagaaccatgagcagcagcgccaagcgctcaacgcgaagtcgccagccaggctgccattgtcttgataattgatcgatgtcacgtaagccgctggcgcagaacaacgctgcaacactgaaggtggcaagtccgctgcacaattgccaggcgatacgggctacacgagaaacgtattgcttcatgggggtggcacaaccgtcgatggcatcgggtggacactgtgtactgtcagttaccagcgtcgtctctgctcgagtctcagtgagcacgcgggttctctgagactccaggtcgtgattcgagctgtaaacttgatacgtggacgtcgaggtgagtctccgccatccaaactgctcagcttggagcgtgtacgttacggatccgttagccgcttcaacacgctcgaagccacagcactggagcgtattctgtacgaatagtttcgtagtggacggcgctgagctccacagatccttgagacgcgaatcaaccgctatctcgttggcagtgacatcgtccccctcagtcgcaggtgctagacgcactgaaagcttatgtccaactccagccagcatgaacgcagtgataaacagcgccacacacgctaccaagtagctgttcaccacccacttcctcatcgtcttgcgtcgaggcgttctttgtgcgccgaaccacgccacgacactgccgaacaacgcgaagagctccattccaccaccaaaaatgagcagataggcacctaagcggcggtcgaacacacgaagcaagtacgacaactgcagcacgttgagctcgaagagcacatcgacccccagacacagaactccaataccggcagctgcagccacgagactcagcaatgccaacaccactacgaagatttgttggaatagtgtcaggggttgacgagggcaggtagcttcaatagccgcttgtgcagaagaaatcgcagccaaagaagcgaagcgtcgaaggcgcagacacagccaaaccagcagcactagcacaacagcttcagcaaccacaaatcccgttagtcgatcgatcgctaaagacattgcgcgctccaaagctgtctctacttgttcacgacaagtaggcagaccaatattcgacgagtcttccacacaagtgccttgcgtgtagtctcgaaagccgcaacagcccaaggtcatctccagattcagaagcgttgatgagagcggaagtgcagtgtacttggcctcaatagcgcgactgatcgacggatccacgtggaagtcgccaagcatccgtccagagtatgcgcgcactgcaagtgtaaacagcaagaagaccaacgagagcccagcgatccagcgtagggctcggacgtcgcgcctgcctagcgcgtacattgaccagagagcaatagcaaaataaactgtagctccagcgacaatcaacgcgccgatctccactccaaacagcgcagcaacgagcgggtccgccatcgcgccccactgaaccatcaagtcaactccgaaaagcacagcgccagcagcagcacaagccaataacgcgtacagtggcggcagtgagcacaatagcgcaacggatacgagcgagcgagcgatggaagcttcagcactagcgttggcaccgcttgtggcaagctgaaccagtcgaatccgacgccagcgcacgaggaagttcgccagagcaacacacgcgatctcgacaaagagcacagcctccacgtagacgaacgagctggagaatagcgtcgatgcctgagctccgagaactgccgaacacgtgcggggcgggactgtattgagagcttcctccggacaagagccttcttcgctgatagccaagaaaccacagcatccgtaagatacttggagttgggtcttgtcgtccgaggatagtgcgtcccagtgagacttcagcgccagcgccacacctcgcggcatggcgttgaagttctcgagcaagtgatacgcgaacataacagcgagcagctgggccaacagaccgacgcctagcgaggataaatacgcagtccgagctgcgtgagacgccccccgtcgtgcaagaagaactcccgagattcctccagtaatcagcacggtaccgcccaccatgagcgcgatgcccagagggcccccgtacaagtacaacacaagttccgctggagtccgtccaagcacgaactgcacttccagtcctgcgaacagcagcaagacgcctagcagcgctaaagcgaggttactcaatcggaagagcagcgtcatgcgtcggtattgtcggtctaccagtggcgacgacccgaacagcgtgcgagcctcgtcagggagctgcactgttgtgttgatcggatcatttgttgcctccccgaactgcactccacgcgtagacgacgagaagagcacggccgacgactcacccacgactgtgggtgctgttggcgcttccgaaggtggtcgagcttccagtcgtttcttcttctgagcgacatagaacgagtcaaagtcctccaatacgttggtcgcttgagtgcgggcctccagctcactccacttggcgcggttgagtctcttaatggtagtgagcttctcccgttgcgcatctcgtgcatccaaggtctggccagctttagcaacgatcacgaagaccccaacgaggacggcgagcgtgacgctgacgacgagcgacggctggtcgttccggtacaactccggatgcagcgcgtagaagtccaagcgctcttccagcgtcaccagcacctccagagccgattccacctctctgcagtagcacaccgtcatctcgcttgtgctcatgctgtcgtccttgaagcacacgtccaccgaccagctcgagatctccgcatcccaagtcttgcacgcggtcgagaagttgctctgctcgatggctgacagttcgcgctggtgcgggattgtgagggcaactagcggcatccacttctccgtctcagcctcggtatcgtccgatgtcaggcgccgcatggaatcagaggctgctcggacacacgtgctcgtactggccagcgtctgcatgtctacaccagcgtcagacgaatacgtcgtcaccgctgcagcttcatcgagcgcagcttgggagtgcaccgagaacagagtgaggcgagagatggcctcggatttgttcaacgtacacgctgagtgcgggctcttggctagtgagaaggcgtcgaggtagaggtccgatcccagacacgctacggaagtggacgtgagcgacatggacagctcacttgagggcgcgtccgtgaagctcgaacctcgtgaagaatacgtgcgcacgtcacttgcttccagcgtagtaggcggttcgtcacctagcaatccctcgctgctcaacgtcgctagagactgaagcgtacgaaccatgttgttccagttcgcgcgagtcccagcagactcaactgtatcggagcaagtgacgttgtccgagtctgaaagtctgcgcgcgctgctagtggtgctggaactagggctgctgagcccgaggagcacggctatcacttccagtagcgtgtcgctcgtcagatccaagaattcgcccggcgcgtccagcgtaagcgcgctgcctgcgatgccgctgctgagctgagtcacaaggctgatctcgctcgcgctcagtacttgcggcgcgccgcgcatcaccgagctgatcacgtgcgcttgtaggccaagacccgagctgcttggctccatcgtactaactgcagtcgatactgtggccaagatggcagcattcatctgctggacaacagcgatctccgtagcgcagttggcccccaccaatccttctgggcaactagcaaggcgtcgagtctttgttgtaggcccatcggacgacgacgacgagctgaacgccgtctccagcaccatcgaagccgacaaaacctgacgcacatcctccgacgcgtcgccgctagaaatgaggttgtgattcgcatcaaacaggctcgaaaggaacgttgtcggctgcgccttggcagcttcaggcagcagcacctcgatcgtgtcgtaagccagcgccactgcccccagtcgatcgctgataaacgccacgatcgtcacgttctcgctgtccgccaagttgccaggcggaaacattttcgtagtcgccgtgggcgacaactgcgtcgccaccaacggcgtcatggatttccgtagctgagctaccaacgcgttgacatccgccgcgttatcttgcagcagcttgaaactcgcggccgaaagaactccgtaggagtacgacagcgggtagtcgtccttgtcatcgctccacaacgagcaagtgagcgtgaacgagtcctgcatggcgtatcctgagctcgggctcacagtgaaagtaccagatgtaggcggggagttcaccacaaccgtgactgagccgaagccgacgttgcctccggtgtcgttggccacgagtcggaagttgtacgtgagtcccggcgtcagtttgaagctgcgaatcgcgttgttcgcgctcgttagtggcaatgtgaacgcgtcgctcgtgttgctcacgtcggcggtaggaagaacgaggtcccccagtgtctgagtccaccgcgttgtgtagggataatccgagctcaccgcagccgtaagagacaagcggctcgagggattgatcttcgaggcagacgcagtgacctgaacgaccgggagataaccagcaacagtccaaataacactcgaagccgtcgcactgcgagaccccttggccgcagtcaacgagaacttcagttggcgaccagagacgaagttgaatggcgcgattcgcagcactggcccagtcgcggagctcaaagacagaggaaccgacggcgtggctgacgcgttcatgcacgaagccacagtcgagcccgacgtgttcgtgacgtcctggcacgtccacgtgtacgtgaacgctgtgcttgaggcgtccggatcaactgttgtggagccatcaagcactagagtgtctcgttcaccgagagcacagtcaccgcccttgatcgtgacttgtggtaagctactcgagacgaccaccaccatagatgcaaagctgctcgacgactggttggatgacgcactcttcatgtacgcttcgactcggaacgtgtacgtgaggccagcttgcagcaacgagcgcgccaagcggaagacgcgcgggtcgcgtgccgagttgtccttgctaaagtctaccgtcgcgacagctccggagccgtctgtgctcttgctggttgtagtccagcgataggcgacgtccgagcttgacaaagtcggacagctcacagcagcatcaacctgcatcacgactggagatccgacgcgcgtcacggtttggctcgactcgcccacgataaacactgcgggtcctggttgactctgcacgctcacgctcttcgagaccaccgtcgtttgagcgaaggcgttcacaagcttcaacccaacacggtatccagcgcctggttccagcagcgaactgttgacgcgaaggagcaaagagctcgctgtagtggcattttgcgcagcggatcgtacgtagcaggcggagcgaagctgtgccatggtggatagcatggtaagatccgacgctgcgttggtgttcgccgccgtagcgagcgcgatgtccgcagctggaactgccgtaagggttgacgtgcccgttatccagtcgcttttgtacttctgacacagcagctcaaggccggcgttgaggcgctgatacaacgccaaccctgcatccgcgcttgtctgagagactgagctggagtacagcgaggcagggagagcgaaccaaagcaactgcgcgaacggccgaccaccggccccacttgaaagcgacgcatcggctgaccaggctccacagctgccaacattctcggggactacaagcaccgcgctgggctggacaatgtcgctcggagcctgcaccgcgatcgaagcctgagagaacgcacggctgataggccgcgcgcgcagcacgtccgctgcggtacagtattgatcggcaaaggagctgcagtcgttcagcaccagcttgtcagccgcagccaacgtcgctccgttgctcagctcgatgcgtaggttcttgccatccacccacaaacagtacgcggcagagcccagcgaatacttggtcgcaacgagattgaacacgagactgcacgggaaagtcttgaggcgagacacatacgttccagacgagctgacgtccattgaagccgcgtggaagaccgacgagtcgaaggcgatgttgacctttgagccggagctgtcgaatttcgcagtcaccggcagcggagggggaatcgcctcccggtcgctgatcatgacggatacactgacgacgccgatggagctgttggagatgttgtagttcgcatcagcactcgacgcggcgtggagaaccgacgaatactgcgtggcagcttccgatatctcgtcatcgatggcaaacacggtcacgacttgcggacgcgaccaatccagcggcgtgaagaccagttgaatgctgcggatcgcctccgttccaagtaaagtcatcgctgaagacgaggaagaaccgaaggaagcgccgatctgcggctgcgtgtacacggagtccgcgagactcacgatcttctcgatcgtggggcgcagcgtcagtgtcacgtattcgtacggctccgagttcaggaagacgctgtacgagtcgttgaagctgccctcagccacgtggagttgcttagtcgcgctctggatggagatgttgacgaacgagacgtcgttgtcggtgatgtagagcttgagatctccgccacttgccgcgtagtcactgactgcgtataaagggtccgaactgagtgacgcatgggagatccgagctgtgtggacgtttgcctcgtctagccagtcgtccacggcaatgagagacacaggttgccacacgctccagttcgtagcgctgaagtagagcgaggtacagccgctcagaatactcgcgttgcaggcgtgctctccgctttggatgcgcaggtagcagtcgtgactggcgttggggcgtacaaccaccggcgaccacggctccgacgtgagacggacgttgtatgacagcacgctcgtgttgctctcgggcgcgcgcagctcccgcgtggacagctcgatcccggacacgtcgttgtcggtgatggataccttgacgcccgccaggttcttcagtccagcgtagatcacatcgttcgtcgtaagcgagtgattgagcgtgctcgaagagcccacgacgtcctgtgtgtggtcatcgaacgctgtcacattcaccgtctgcgttatattccagttgcgccacgtgaacacgagcttcgtggggcttggcacggcgagattccccactgtccccaagttggtgacggccacggtcaccttcgcgaacggctctgaagctagcacgacggtgtatgaatcgacggctccgaggagcccctcggtcacgaagacacttgacttgctgacgataaagcccgatgcgtcgttgtcgtgcactgtcacgctgatcttggggatcgtcgggatcgcgttgtatttggggtcggcgctgtaggaaacgtgcgaaatgcccgtcatgtgcgtatcgtactcgtccaggttgtcatcggtagcaagcactgcgaccttctgcggtacgtcccagttctgcggcgtgaagacgtactcgctcactgggagcgtgaggttgcacagtccgaagcggtagcactgcgtgctgtcgctgtcaagccagggtagaaccacgatcttcacgtcggccagcggctccgagttcagctgcaaaaagtactgagccacgagcacgccgtcctcgctcacctccagcgccgactcggacacgagcaccttggcgacgtcgtcgctctcgactctgacggtcacgtctggcagcgggagcgccaagtagatgtagtcgtcgctgaacacggtgtgcgtcacctttgagaacgtctcggtgccgttctcagtcgtgtattcgtcgaggaagtcgtcaacagcttcgagcttgacttgctggggaacgcaccagttctcaggcgtgaacacgatccacgggttcagcaccgtgtagttgcagaggaatcgctcttgcactgtctcgttggcgatggcgtagacgcaaaaccctcgaaggcccaacggatcggtcggatctgcctggaaaatcgctgtggggatcgccgagcatctcggtttgccctgaagatccagctcggacggcactggcagcggctcaatctcctgcgtcaccagcgacacatccgtggtgattttcaggtccgcgaagcgcatgtagtcctccagcgcccattccagccgccacgtgtggcctccatcgagatacggcccctctcggtacacgcgcacgcccttatcgaacttgataccgcgccagaccttggtttccgggtcgtattcggcctcacggttcgagcggacaaagggcagcgcctccaacgcttcgtccatgcctatcgcgctcacattgacgggtaacttccacgtcgtgccgacgtacgtccgattcgtgatcggatccagcagctcaagccgcaacgaaaagcttcctctcaagtacgtcccgttggcgacagtcgtggaggtgagagtcatccctggagcttggcgcatcagatcgtccgcgaacaccgcgataggcggcaggtttcctggactgttgaggtagctgatagtccacgtgtacccgttgcagacgttaaagacgtcacagtccacgcccgcgcgcgtcacatttgtcatttccgtgatgtccaaagcaaagagcgccttgcggagcctccaggacgtcgcgttgaagggcaacgccgttgtattcttcagcgggaggttcattatgtacgcgcggcttgtgcgcgggtcggtcttcttgaaccaaccgcccatttgcactgagaaggtccctcttaagggctctccgtcccgcacggtgttcactccaaccgtgacccccttgcccgtcaggtttaatggagttacgatcatactggggaggttcccgtagttctgcaggaactggacagtccacgccatccctccttccgcagtgagtttctgtcgagacacagtgacgttcgctaggccttggagctgccccagcttggtagcgactgtgtcggccgtgtcgttccaaaagatcggcaccgtgcggttcggcttggcggtcgtggtgatgttgagcggcgtgaagtagtcgatcacaaacgctccaccgatcagcactggtgactgagtttctaccaccgatacggacaacggggtgatggcgtcgggggaagcaacaacgctggctgtggaattcacgaccaaactggcgaaggtgtccacgctcacgaacgtgacgctgtactggaatccgtagcccccaccgctgagaagccgccgagaagccgatacggagtagatcccagcctgtgaacccagagcagtctgaagcgcagctgcagtaggtggcatcgatactgtgaacgtcgctgcaccgtagctgagcttaagtgccccagtaggagaactgcttgctctcgaccgttgacttgaaattgtgccttcaatcgccccgttcgctgctacagacaacagtggtaacgcgccatccgcactcacgaaccgcaggaacgtgatactccacgtcagtgtcgatgcagtgtactgcacgtcccgcgtgacactgacagcgttggtggttccgggaaacagaccgttcactgcggtttgcacttgcagagccgtcgcaaacatgtcgagggctgtggagctggcacccgcgccagttgagatcgagaacgtgctgccgtagctcgtagcggctgcgatggcgtcgccggatttatatcgcgtcttgaagacgtcgttgaactggaagacgatcgcctgaacctccaagccgaatccaccagtaacttgcagctggacgatttgatccacgtgactcgcgtacgtcacgatgcgctgcatttccgtgatcttcgtcatgcgcagcgatatctggtggatctcccgcgtcgagttggagcgcaggtgcaccaaactcacgctctgctgacgtggaagtccgcacgaagtctcgtcaaaggggtagccgcagcgccgatagcacacggcgttggcctcgttgctcattgcgatggtgacattggcgtacggctctgtcagcaacttgagcgtgtagtggtccgcgtgcgggtacttgagagtggatagatctaggcttttctcgaagagagccacaactttcgtcgagtactccatgtccgtgttgtcgttatccgcgatcgcgacgacaatatccgggagcacgagctggttgtaaacagaatcgaggctcgccgacgtcgagcggataatggtcaagtgcgtgtcttcttcgtcgagatggtcgtcaactgcgaggacgcgcaccgtcttgggcaagctccagtcttccggcgagaagatgaggatgtccggggagaccgtgacattacacaatagcgcgctcgtgctcatactttccgtgtcatcgccacagctcaagaacgagtcgtctcctgctgcagcgaacgtcccgtccgccagctcaactgagtgcgagggacacaaggggcttgaaatgcagcgtcgatagcagccagaggcgatgtggaggctcacgcgcacctcttcggtgggctcggagagcagcaccacctggtagtcgttgcctttgccgtcttcggatacgctgagcgacgcagtggagaactcaatgcctggcacggccagatccgttattgtcaccagcacaggcgtgactggggtgggctcggcgtacacgttggcagcgacgacgacctccttgactggctgctgggcccactgcgcctgcaagtctaccagcgcattccgtcgcgtcagtcgcttgtcgctgctctgcaagaccccgtagagcactaaatcgcggtagaacaccgtcaccgactcgttgagctcttgcagtagttgctgaccccctgtggcgttattcacactggccgtgctagcggtcgacgtgagttgatacaacgctgggcttgaggctacgtggaacacgtccgtagtatgcaaaccctcgtagagctggtcgtctgtggcgagcacgtgcacaagctgcggcaggttccagctctccgttgtgaacttcagcacagtcgggatagtcgacacgttgcacaggttgaagcgatagcacgcgctctccgcgttgatcttcacggtcactggcctcagcggcttggacgatagcccgattgagtacgtgttgtgtgctgccgtcgcgtcagtagccacgccgtcgagaaaatcgtggtaatggtccatgatctcggtgacagtcaacgctcgagcaaaccacgccacgttggtgagtttcccaataaacccaccgccgtcagcgtctggctcgggggctccgaagcgcagaatcttctgcgtgagactgagcagcgccatgttacacgtcgcggtgctcgtgtagcagttggtagtctgcagctcccccgcgacgcatacggagagggagatactggacgaggtaggatcgtaggtcgctacagcttggtgccacttctccgcaactggcagcaaggcggcgtcttcaccgagatctgttcgacacactgtcccatccgctgcgtttgtcatctcgaagtagaaccgcgcagtcttgctgctaactccgacggttccgaaggtcacttggccgccgcttgcatcgttgccgtacattgtcacggcctcagccggcagaaaatctgctgcagcagcgatgaactccgcgctgatgtcgaaccagaactccagcgagaacgagctcatagccggctgcactgcgactgcggccgagaagaacgtcgcttccaacgtatcgtcgatcttcaaatccaccgcagtcgaagtcgtcggtagcatcaacgcgcccgtggctcgactcttcccttcccacgccgtctcgctctcgtcagtgctaaccagcaccttggctgcgtcgtcgaacggccagataaccactgggttgtcacgcagtaacaaggtgcggtgctcgttcaccgacaacgggagtcgatcaactggcagcagccccgccttgcccagaaccgcaatgtcaacgaagtcgctgaggatcaaactactcccagccgagttcttcacgctcagaggcgcctgacacgccgttcctccacaaacgtagtttgtgcactgcgaggatggagtgacaaccgcccccgtggcatccagcgcgcatgtagtcgacaatccctcggaactaagagccgctgatgcggcgtcactgcggattccatcaagcgccgacccatgagacgcaacggagaactcagcgacagtctccacgttcgccgacgaacactgactcacgtcggtattgacgtcaaccagcccgacctccaccggcgagccgaaatcgagcaccacccactcgtggtaggacgtcgcgcctgccacatagcacagcgtcttgtccttcgcgttcagcagcgcgcttgcggatcctgcacccgacgtcgctaactgggagcttacgctgtggatcgtgtacggtatcggagatgcaacggatagtatggttgagtctgtgggggctacgtcgctgggtgggaagacttgcacgctggtgactgcgagcggctttgcccctgatccaaacaagtccagcaacaagtaacgcgatactgtggctggattccagcgttccacctccacctcgttcagcatcaagacgcctgtgccttgcttccgtacagtcacaaacctcgcggtggagaagacactatcccacgtaatggagttggtgtagttggcacacgaaaacgacagcgtcttggtggcggtagcagaggccccagaagcagtgccatcgctgttcgtcagtggctgggccgacagcaatacgtcgaactgctgaacaaacggagccttgagttgcagtaacgagtccgtatgactgtagtcgtacaggtcgccactccatgctgggtaaccattgctgccagtagatgttgttataggcgcgcagagctcgtcgtagtggctccccacgtacggatacagcacgatagagcgaatcggcttcacgctaccgaggtccacttcccaccatggattggtgcccacatccgttcgcgtgctccctgctgccatcgtgccattgtttccttcgtcttggataataagagggtcccagtcggtgtgtttcaggccatccacagccaggtacgacaacgcatcgcttgggctcgtgctgctctgtctagtagccacccccacggccaggttctcgttctcagatcttctcactgtctgtagaagacgccacgattgcaactgtgcagtgtttgtgccccagtccgacttcagtcgggagcggataccagctccattcgccgttggagtcaccgagatgaagggctcaaaggctttcacttgagaaagctgcagcactcctgttccctcgcgatagattcgcacagcgactgcaccggcctggacgtcccatagtagaatccccttctgaacgggtaggcgctgcacacgaggacacgcacttgaacatccgtacgtaagcgcgtcttccagcgacatatccttggaatcaaacgccttcagcgacgcaatcaggacgatgttgagaacatcggagcctgtattctcttcaacgatagatgccggtagaaatactgccaatgtgcccagcctcgtcagttgaggcagcgtcacctcccaccacggctcactttcgctggtagttgtagccacatcgacgacgctgtcgaccgagtcatcgtacttcgccccgttggtagctaacgaggcctccaggggcttcttggtctccagcgatacagccgtcgagctctgatttgcttgtagaccgctcagaatgttcgggaactggtacgatagcgccagaagaggacgcagcttccgctcgaagaccgacgaacacaactgcgtcgtggcgatcgactcggtgctgcctccttccgacagtacttcgatttggagggatacaacggagagtcgggtgggtagaacttgagccagtagcgacgagatgtccacctcaatggagcggcttttctccacggttgctgtgacctgcatcgacgcgccatccgacaggaagctcaaaggtttgggcgctgctgtcgccttgcgaatgctgtccgtcgtccacgcgttgtccaccaccgtcacctttaactcatactccctcgtaaagctgacttcacctgaggaatcgctggagctgctcccgccgtccagctccgagacgtcaaagacttcgtacggagtttggtggagcaccagcgtcgcccctgagaacgcgagccacgtgtctccatcatgcaagtgcggcaggtggaacttcatgaacgtcttgacaccggaggcgaacacgaggatattctggagcgctgaatcgatggttttgctgcttgtagcggtacttgacaccgacaagtcgtgaaatcccagcgctgtgatgtagtcccccacccagtccgttgcgtcacgcgcctctttcgtcgcaagctttgcctggggctggttgaccaccacgttcacctttgccacgtcattatctcgcacgagaacgttgacacgggtgtgatctggcgagtggatgacggttggcaccgcattgtaaggaattgcacccccacttacagcattccacgacgggtacagctctagacgagcgggtgcgatcgtgccttgaaaccaaaatgctgtggcgttcgtgtatccgtagggggagttctgcacgcgatgtgagatcgtgtagctcgcgttgagctctgcgattgcatcgtcgactgcacgaaccacgacgcgctgaggttgaagccagtttgtcgccgtgaacgttaagatcgacggtgttatcgccacctgcgagttccccacgatcgcaatgctcacgttcggagcggggatgctgtgtgagctccatgcagattgatcgtagacggtaggagcgagcgctgcaaagttcttgccccagaatccacactcatccgactccttgacggagcaatacacggacgagatctgcgttttgtcggcacttgcgacgatctgcgcgtgacctccgatcgctggcggcgcattcagaaccacgtcgtagaaagagccgccactgtcgccctccgtaacgtccagtgaagaggtcgacagcgtgacgccgggatcgttgtcccagacgctcacttcgatgctgttactggggaggaagctcgccatgccacagttccaagaatgcctctccaacgcatagttctgtggaaacattgcgaatacggcgttgagaacgcgaaccacgtagcctttcggccactcctcgaacgcccagcgcatagtctcgagtcgaaccaaccccgcacagatcgtgtgcaccacgttcttcggattcgcgctcattttacgaccttgctccacattcatcagaccgaggaaactcagcacaaagctgcgtagctcaggtgggggcggcacgaagtgcaattttgacaagtctctgtccaccgcagcatcagataacgccataagatcggtatcgtttgattccgacgtcagcatgtcgataagagtcgcgtagctcatgtctgccatagtatcatcggtactcccagggtctagcggtggatttccgaagcgtactggtacagctccgaccccgctcacgacgttcgcaatacacgcgccatttccttgtgcgaacgcgcactcgttcgtaatatcacacactcgaacggaagtctggccatcttgtagttcttcctcggacaatatacacagagacgaatccaacggatcacagttcggcacatcaaagcactgtggtcgacgcgaatggtaccggatgtccttgctctcagtgtaatgaagcagagggcctccgttgtaaagtccgccgaactccacctccgaatcggaatcatccacggcactcaccaccacgcgctgcggtttatcccagtcttcaggcggaaaaatgagcacggcggagccatcttctgcggctgtgcccgataatactggggcgacggccgtctgcgtgccatgcaaggggacgatcacgaccttaactggatgccacggcctagacgtcagtatcacatcgtagctgtccttgcccccgccctcagcaacgaaaacatgctgtctcgagagcgaaactccagcgaggtcgttgtcgtcgatctgcaccgttacattgcgccccgtaagaaaaggagtgtcatctccgtcaaaattcgggtcggcgctagccacggagtgggtcacgacggcgtagtgcctaccttcggctagatcgtcgtccaccgcggcaagacgcacgtactgttcccgattccagttcgcaggcgtgaacaccacacgctgcggcgtcaaaaactggagctgctgaacgaattctcctctcgggtctgcgagccgcacgtcttccgcctgaacgacgacgtccgcgagtggctggcgattcagcaccacggcgtactccgcgaccagtcctccttctctgatacgccgtcgcctcggcgtgagcgtcacccctccgttcatcgcatagtctagtatatctcctccaaagttgagactcacggcgaagtcgtactgtcggttctccacgctggcgcgagcgttcgggtccatgatctgcgcctcgtagtccgacattgtgcccgcgtgcgtcctggtctcgagcatctgcgctacgtccacctccacggtctcgtccacttggtgggtcacgcacccgcccgagagcagcagcgtgttgaagctgccgtccagcgccacgccgtacgcaaagtcattggccgtcgtcccaaactgacagcaaaaacacaacgcaaagacgcatgagcagacgctggtcgtcatcacccaccgactgggagcactgccccgcgttcatacctgtcgcatccagagcttgtcgccgctgagcgatatcttggccagcaccacgtctcggccgccgtactggccgaagccgttgagcgcgtggccgccttcgtccaggtacccccacgtgtagccggccacgtacagatactgggtcgtcgtgccggcggccgcgtcggtctcgtcgatcacggcgacgaaagttgctgcgtcggcctcgtccgttccccactgtcaattacatcagtggtagtatccgatacaccgggttagagtgcgtcccaagagctctcgagtcggcagggcgacccacgcacgtacttgtctggtccagccgagcgagccgtccgccttgacttgagccacgaagatgtcgagctggccgacgtcgctactgtcgagcgtcttggagcccgcgaagtagaggttcccgtctgcgtcctgcgtgcctctgctgtcgatgcgcacgacggccgccgcttccggctgctgccagtcgaagtcctcgttcgtggccatccacgcctgcacctcctctggggtcaggtccgccgctgcgacgatggctaccgccaccagcagcacgaggaccgacaagccatagcagctggccacgaatgcagacattggcactactggagtggagcggccttaagattcgtagaaagaggcgccccccatccaccgaaaggtcgggacactcaaagtgtgcagccagctgcactgcacagtagcgctattattatagtaatgccccgcaagtgcgggagtcatgtaggccttgcgtaggtattagcgcgcgtgtacagacgtgagcctggaaacgtcgctaaagagagtaaagtgtctatgcctccttctccacccttttgggtattcacgagcggttctccgagggccgaacctatttttttcaaccaatcacaggcaatcaaaaaagcagcgtgtaagagcaaaagagttattgtgcttttcggttgttttggcaaatcggacgtgtaaaacagctacctactcgtaggtagttaggacaaagaattgctagtccgatggaagcacttgcgcaggtcctacaaacagccgaaagcccgaatgtcgcctattttcacggcattcggggtttgaggtcttacgaaggactcctacctagtcttgtggcaggactttcatacgagctgactctaatacggtgtatgtcaaacgcagaataaacctatgaaaacacgatgcagtcgatacgttaaacactccagtcgtcgccattcgccttcgcgggttccggcattgcttgcttccccaaacaaagattacttgactgagagactccaggagaccagtcatcggactcatccgagatttgcatctcagatttagagaccaccaacctcagattaactgacctccaaagtcctacgtaggactcggcaaaatgaccgaaaggcacaataacagtgtaggtagtccgttcaaacatacactgtacagtaatgtgtctctttaaagaacgggtgaaatcctatatgatgcaagaaagaatattcccactatccgcacagatatcaggccgggatactgatttagtgactctatcagcaaatcagcacatcgttgttagaatacaggcaatcagagctcacaaaagtagagatgggcatacatttgtctttaaatcagtatatacgcatgtgacaacacaaacctttcattcaaaatatactctttctcttcatatatattaggcgttctttgagcagacacattactgtatgtcatacagtgcgcgaaccgcaccccaaaaattattttttaaaccaatgattgtgccaaaccgctgcttatgattcgtctagagtcgatagaaaacagatgcaacaatcagaatcgaaaaagctgtaaccgtttttttgcaatggacgaaaaacagactttgggtcgggtcaaaattatagccgcacccggaaacctatcggtaagattggtaacaaactcgtggagagctgtttcaagcgtaataaatgaactaactcgattaagcagctcgaataacgcctagtaagctgctcaaataaggttaagctgacgaggttgataagattcaatggagacacgtactatctagaatttgtatagaagagtggtgtttgacagtgtggagaggtctatacttgtaagttgagattgtcagctgactagtgtcttcattggcgtctattcaacagggtagcgatgctgggcttgctcagttcagcaacatgtaccagaaaactcgatcgattttttttccgggtcagtacaaatcctttatacttgatgtttgtatgggaaaggaccgccaaacccagtcacaatttcaatcaagtctagtggtacataggtcgaccaatagtttcatggacaatgataacggataataattgagtaaatcccaaagttgttttgtttttaatctttaaaagcactaccagtacaactctctagttgattctaacgtgggcatctactgcccgagaatgcgtaattgaacaaatagttgcgcacatcgaagtgtatcgatacggaaatgatgtttcagccaaacctttgagaggctggtaaccagcaagccccgctcttctttatcgtggtgggttctcaggaaccgaaagtcaccaattgaggttgcctggtctgatgaggccatcggtgacataacacccctggtcagcgtccaatggctgcgttggcgccagcaacgagagagctatttcattcattttgcaggtaaggtatactgtgctcatttttgtactatgttgtgtgctaacgatcagacgagagagctacagtagcggaacgaaggagagacgcacggtgcgctgatcttgaccttttaacttgaggatgttagctaagtggcaataataatccttaattcaaaacaaaacaaacaaacaaacttttaacttgagggcttgggggggggtaaattgcggaatgagaaatacgctaatgggccaattccttggaagtgggtgcttcaacgcagggaaaaaaggcttattcagacgaacgatgctcgtgtcactgtcgagttgagctgattggtttggcgacagacacgaggttggacatcttcggctaagagtgattgggtattgagcaaattagcatgtaaaaaaaatgcagcctgcacctagacaagtcatgttggtcattgtaatgggcctactttggcccactactttagcttacacgtgtgagcgtgtatgtgaggaagcgtagcctagtttaaatttgttatttatactcgggcctccgagtatagattaatctaaataaacgatccaaataatgtttttgggttaaaatgagaactgctatttttgttttatgtttctgacttcctctaaatgtaatattctaagataggaacctgccaacggctggttggcagaattccaatgctatgcttgtcgctcattggctaagagatgctgctctcaaccaataggaatcctaagtctctatggaccacccgtcgtggtgatcgtaaatgtatgtagcctttggtgtatctacaccaaggtcgagaaagtctttcaaacctctaacagacgtcgtatctgttagagttacaagtgcctgtagccacttgtgcgtgtaaccctgttacaccatcctcccctcaatgttagacgcgccgagccacggcacgtcaatcaggaaattgaccattcgtcaattcttcacgttgggagaaagaaaactcgagcttattcggcaatgagctcgccgaagaagaccgacgctgcagcagtggggaagtcctccgccgggatagagactctctctatccccgagtaccgcgagcgtctcaaagcaaagcgtgacgctcttgctgccaaggctgtggcggggacaactcaaccagagattgtcctcgaaggtttttctgtaatcaacggcgccgttgactatgaagacgacgacgtggaggtggaagagggcgaggcctcttctagcaagcgcaaggagtctatcgacagcgatagtctcgacctgcatgccgggtcgagacgccctcgtgaaggagacgactcggacgcttcgagctcgaagcgttcgcgcggcgagagcgacactccgctctctgctgctgaggctttaagctccccgcgtgaggtggcgccttcaagctctccgcgcgctgctcaggcagcgcgcgatccgtggatgccgtcggcgtcagagatcgcaggccgtgtgggcaacactgtgcctccaaacgaaatcccgctgtacgtatgcagcggtatccacgacgatgctgttgcggaggagcagcactttgatccgttaacgaatcaaaggcgcgactactacatcgggctcctccacgagctccggtacttctccagcaagaagacctcttctcgcagcaatgtgcatgagtggcaggcactttgtcaaagttggaatgcttttgttgagaacttcaactagaaaccggctgcttaccgcgagcgggttaagcatgcccgtgagcgcttcgagacattctcaacgcgcgggcggctggagcagctccacagatcctctgtggacgctggtattccatgcgctgtgcccgaaggccaacagtgcacgttgtgtcttccgggtgcggtgcgcttgagcaaccgcgacctaaacgggtacacgacgattcgtgtacctgatagtctcaaggatcttcgtgccaagttcttggcacgcaaggaacgcgatcgtgggacctcgggcgctgtaggtgaccacagcgctcgcactaccttcgcgtcggcagtgcgtggtgagcttcgtacgccctcactatttccggaacgtcctgcagcaggacgtcccgtggctcccatgtatcttggtggggcggaacccctctccaacgaatacgataacgaaccggctgccggttcgttttcgggatactatggttcacaatacgctcaacaatccagcgtgttgagccgcgggcgttgcggatcggaggcggcggtggtgggaatacgccccgggtatggtcaacctggggttgaccttggcccgacgttcgaggagcgggtcgctgctgtggaacagcatcagagccgggagttcgccgctctgaagcaggaggtggcgatcatgagggctcaagtcgctcatgcctcgcagaccgcgtcggacatctctgtcgacgtgggaggtcgcgtcgcacgcttggcccagcgcgttcacgcgctggagcagaggttcgctcccgctggggcttccgcttcgggccagccgagctaggtgtggctcgtgctgcaggtatggcttcagccgcccgacgtaaaaggtcggatggaggcgcatgctagatggaatatctagcgtgtaggcgttgccatgccatgccaacaccgtgaacggcccgatgaagcgcggagcgagcttgctcgccccgaagtcggaaactgcgtgtttaggcaggttttgagttgctaacaaaaccgatgaacccttcttgaattcattagtgttgcccctaccaacattgtctgcgttcagcttctgtcggtcgacagaagctgcgatagcgtcttggacaaaccgaatgacggcttgtctgcgctgcacgaagttgatttcgtccgaactgatcgtttctagcagtaggcccggtctctgcgttcgtcttcgcggtatctgtgccctgcacagacccgttcttcttcttcttcttgctcttgtcggcggctgtgccctgcacagacgcgtgcttcttcttcttcttgcgcgtagtcgcggctgacactgtgcaagtgtcagcggcattctgcgactgctgcgttgcagtcgtagatcctcccccacttaaggaaggagccaccatcccgagtagactcgggaggcgtgggtgcctgatggcattcacgtagaacggtgtatgcccggtcgaggcatgcaccgagttgttgatggcgaactccgccatcggcaggcactcgctccagtgttggaacgagtgagcgtagctcttaagcacgtctacgagcacgcggttcacgcgctcggtctgcccgtccgtctgcggatggtccgcagtcgacatcgaaagttgactcccaagaagtgtaaacacttcttgccaaaggtgtgcagtgaagcgcgggtcccgatccgacacaatgtcgatcgacatgccatggtgtttgaacaccatgtcaacgaacggacgcgccgtctgcttcgcagtcacttcagcgggtaccgcagcaagatgtaccatcttgctgaagcggtcaacaaagaccacaacgcctgtgttcccctggctgtccgggggaagaccgaacacgaagtccaaagacatggactgccaacactctcgtggagttggtagtgactgcaagggagcctgcgcgaaaggcgcagccttcacacgttgacaaacctcgcaagcacggacgtacttgcgcacccatttgtactggtgggcccagaagtctcgcatgagaagaaggtatgtcttctcacggcccggatgccccgcagtcggtgcatcgtgatactcgtacatgatcctgagtcgcaggtcatggtcattgggcacgacaacgcggtccgcgttgtcgtcgactgcactatagagtaataacccgtcgtgcacccgataacggtgtgcacgagcacgaagatgcttcggcaacttctgacgagttttgtcagaaggcgctgagccgtaggccagcaagagcttcgcgtccgcgtcgtgcgcgcacgcgaccttcacgtcgtccaacagtgacgacgttggggtgctcgatcgcatggcgtcaatggaattgacgtcggcatcagtcaggtcgacgcgagagcgcgtcggccaccacattgagtcttccgggtttgtactcaacccggaagttatactctgcgaagaatgagagccatctcgccatccgttgcgagatgtgcggcgacttcacagccgtccgcagtgacgcgtggtccgtatagaccacgaacggtttgcttccgagtagatacacttggaacttcgcgagtgcgtacttcatggcaaggagttccttgtcatgcaacgggtagttgcgctcagctggtttcagctgacgcgattggtagtagaccacacgatcacgaccctcgtgatcgtgctgcatcaacgcacatccgattgcgaagtcggatgcgtcacacacaacgtggaatgggcgatcttggtcggccaccgccaagatcggcgcctcagacaagccccgcttgactgcatcgaaggcctgctgacactcagcagtccaaacccactcggcgtccttcttcaggagctgtgacagcgggcgtatcatgctcgcgtagtccttcacgtacttgcacaagtacgtggccaagccaaggaactgccgcagttccttgacgttcgacggcgtcggccactcattgattactctgaccttctcagggtcagggcggacaccgttcttcccgacgagacacccgagcacgggtatctcgctcgtcccgaagatgcacttcttcaggttcgcatagagcttgtgcttgcgcatgagcgcaagcagcttccggagatgcaccttgtgcatctcaacatcgctcatcccgtccacagcccggctgtggacgaacacatcgtcgaagtagctcggtgcgaagtcgcgcaccgagcgcaacaagtgcgtcacgcacctgttgaaggtcgcaggggcgttcttcagaccctgcggcatcaccagccactcccagagcatgccgcccggcgtgctcacagccgtgagagggatatcgctctcacgcatgaggatctgatagaacccatcgcgcagatcaagagcactgtaaatagtgctcctggccatcgaatcgatgatgacatcttttcgcggtatcggtgtctgcgccggtatcgtcgcatcgttcagcttgttgtacgcatgaacgatgcgccagtcgccctgtggcttcttgacacagaacgtcggagcactgtgcggggattttgattcccgcacttgtccagctttgcgacgactctcaaagaagtcgtcgatcgccttgacctgctctcgcggcagtggccactgccgcgtgacacaatacttcgtccccggcacgagatcaatctcgtgcttgatgcccttgtcctgcggaagctccgcagggatctcttccggaagtacgtccgcgtactcccgtaagatttcgtagtagggactcgtcttcaacgagtcccagctctgctcttcaaagcgctccttcttcgtcttcgcactgagagtgtcctcgctcgcagtggtgctctccatgaagaactgcctccgttcttcattctcgctcttcgttctctcggcgtccgagagaatgcatatttgctcgatgcgtccatcgtgcaagtcacgcgcgaagcgcttccagctcatgactggaagcgaagtcaactccgacgcttgcgtcggagggttagcgagagtcatctccctgtaccggaacccggcacaggtacgcgtcaagacgttcagcgtctcgacgtccggcttctccgcctccgtctgcccggcagacattccttgtagcgtctcggccccaggccgagacttgcgcagcgaccttcgcatgcgccgtcttcttgttttgcggagcccggctccgcttggttcttgacctcgtccaggcccagccgtggacgggtgttcttcttgtttaccaccggcgggttcgtcccgcgggcgagcgacttcaagcccggcttggtcgcccggcgcttcgtcgtgcagcccggctgcacgacagtatgcaagtttttccggtgcgggacgtttgcaaccgtccgcaccgcgagcagcgtcggctcccggagccgacacgccatctttacctcgacgcctgttattggcggagccctccattacggagggtgcgtcggctccccgagccgacgaatcaaatttgtccatgctatcgactcccggagtcgatgcgacttcaatacctcgacgccaaccattggcggagacctccattacggagggtgcgtcggctccccgagccgacgaatcaaattcacccaagccatcgactcccggagtcgacggcgttacgtcaccttggctcttattattggccagacctgatccaatcagattcgcgtcagcctccacggctgcggcgtgtgactcgcctgcgtcatccgtgccccttgaggccggagactcttccttattcgctgaaaagcgggtgtcgacctccgaggtcaacacatttccttcattagctgtcggcggcaacgccgacgctagctgctcttgcgcgcgtgctcgcgcgcgcccagggcgctccgggacagcggcattaggcgctggagttgcgcgcacctgtcggtgcgtgcgtagcggcaacagggccatcgctcactgttccgctgtcgcgaccgaagcgcacgagagtgcgcttctcccaatcgatgactggatcatgccgtgcaagccacggtatgcccaatacaatgtcaaacttatcgtccagatccaggacgataaaggtctcgacaaactcttgattttcatacgtgaagcgcacgcgtaccatgcgcttctcggtcttcacgacagcacccgttgccagtcgtacttccaacatacttcgaggtgtctttaaatcctcgaagtcaagccttgatagacttcgcagtcgaacaaagttcttcgacgcgccagcatctaccaaagcacggagagagccgcttgctctcatcgagttcacattcaggatgacaaggtcaggcttgtcatcttggtttttgcagtgagaatgaatctcacagggggctgcagtcctcagtgtcgcgcgtccaagatcgacacgcggaaccgcattaccagtagggcgcccccgcgcctactgttgtccagcgtttttttgtttggttgcgccagtgcccggcaccgccgcgatagccaccctgctggtgcacgggggccgtgcactcccgagcaaagtgaccgactctaccgcaacggtagcattgcacgttgtttccctgcagctgctggggtccagcaggtgaagcactcgagaggtccatgggttctgggcctcccgtcctcactaccgggcgtggctgtggcctcggcacatgtgcatgcagcttagcctgccgcaggctaaactcctcctgcattgcaagagtaattgcagcttcgagagtactcgggtactcacggaagagataggtcttcacaggcccatctctcagcccctttatgaacgtgacgaccttggtcgcctcgtcgatcggattggtcacgatgttcgagaccaagtaccgtgctctctgagcgaaagcatggacatcatgcttgccctgctgcaggtcgaggaactccggcctcgaccggaactcgttttgcggtggctcaaacacttgcctgagctcttccttgaaaccctcgtacgtgctaaagcacgtaggatccgagagtcggcgtccatacgcccaacttctagcacgtccgccaagacatgacatggcgaacgcaaccttcgacaacgggtcgatgatacgtcgagccgcaatggcagtgtcgagttcgacaagtcaacggaggagaggttcaccctctcttccgacatagttactcacattgagctttaacgattgcgcgcgtggtgtcgtcccggacgacaccgccgtagtagcagcaacatcgcgttgctccttcaggatgaaacccagagcaacaccgtgttgctctgtcggcgttagcgtacgcagcatcgtaactacagccgcctcaccaatgactgttgacagtcgttggagagcctcccactctggatccgacaggtggggacagtcagcgcgtgcaacgtgagttgcaggcgtagtggagctttccatgggcacctctgtatccatgggaaggttctcagctccgcgttcgtgcggtgacgtacgaactcaggtagtcggtcgttggacggactacaaagtgctaccaggtgtaatgggcctactttggcccactactttagcttacacgtgtgcgcgtgtatgtgaggaagcgtagcctagtttaaattagttaattatactcgggcctccgagtatagattaatctaaataaacgatccaaataatgtttttgggttaaaatgagaactgctatttttgttttatgtttctgacttcctctaaatgtaatattctaagataggaacctgccaacggctggttggcagaattccaatgctatgcttgtcgctcattggctaagagatgctgctctcaaccaataggaatcctaagtctctatggaccacccgtcgtggtgatcgtaaatgtatgtagcctttggtgtatctacaccaaggtcgagaaagtctttcaaacctctaacagacgtcgtatctgttagagttacaagtgcctgcagccacttgtgcgtgtaaccctgttacagtcatcttcagctaagcttggtcgattatggcgcaaattgatacgtttgaatgcaggttttggtaaataataaacgattagtatcaacctttggtaaataatgtgcataaattttagcatttattaagaaagagagacccggtttggtacccggttttggaaagttacaagtttttttacctgggcaagcacaggtcttcgacctgtgaacagtgcgtagtttggtaaatacatggctacgtatcaaaagtagagtaattcgtcttgaaaataatgcccgagttgcttccagaatccacctagtgttgtctcggaagtccgaccaaatcgccacctagtgtttgcacaccacttatatcgagctagctcgtcacagattgaatgcagacggttcttttctgtcgtgggatatgtagttatattgttttaccatttctattcgctacaaacatgcttttcagcttcataggaaccgtgacgcgaattggcacctcactcgttcccctggttggtgtacagcggggtactcaccactccaaagctttactaaccattctaagcagcttactaggcgttattcgagctgcttaatcgagttagttcatttattacgcttgaaacagctctccacgagtttgttaccaatcttaccgataggtttccgggtgcggctataattttgacccgacccaaagtctgtttttcgtccattgcaaaaaaacggttacagctttttcgattctgattgttgcatctgttttctatcgactctagacgaatcataagcagcggtttggcgccgaaagcacaatttaaaaaaataatttttggggtgcggtaataatttcggcgcgcactgtatgtgcaggtagatgagcgcctagttcgctgcaaggttttaagggcgagtcggtgtcgttggtccaatcgggcgggttggtgacgttggcccagtcggcgtggttggtccagtgggggtcgtcgggccggtcggagtagttgttgtttgtgccagcgggatgccttggcccagttgggtggtgtggtccagtgggattgctaggcccgcttggtcctgtggggttcgttggtcgagcttggtccctgcggtttaccgggtagccggagttgttgggcgcgcaggggttgaaggagtagacgggttcctagggtgagaggggccgccgggggtgtaggggttggcagcgttctcgaaggcgccagggttggacgggttgctggggctcgcggggttggccggacggtaagggtttcttgaatggtttgcgttgtgtctagcgctagacgggttggcgtggttcgcctcgggacgatcatgacgctcgggctggcgcgttggtgttgattggtagtagtccgggtggcgggcaggcgcgctccagctctctcgatttactggatagccactgttgcgggccgactcggtgtggccgcgcagctctggctgacgcgctggtgtcgagaggtactgctgccggtcgggaggcgaacgcgggggatgcgtggcatggtggtgcggtgaatgcagaggcatagaggtcgaacggggtggattggtcgcgccctgtcggttccggtcatggtcgtgtccgtgatcgcgccgctgcggctgggccctcggcggagagtagtgctgcgggtggtggtggtggtggtggtgcggcgacgacggcctggcagccatcgactgtggcacctccattcgtaagttccgcacgaccgacttcgcctccgtgttaaccgaaatatcggctgaggcaaggctcaataaagcagcgacggccaatatcgtcacgagcttcatggcggatggcggtgagaagctctgactgcttcaagatagaggggtacttgggccttggaccgagttggtaaattgaagagtgagatcagcctcggctttctcttcgtccgagaggattttgctgttcgttcgttgctagctgagatttcgacggggggtggcgcaatggctgctggtgcataaagcgattgtgcagtgaaatggcctgacggcgctgggaggtgcccgttgggcgaacaaatcactcgctgcagtcgcctcccgcccccatccactcactcaccgcgacccgaaaaggcagctctgcatgccgccgtcagttgagggccaaaagtcttgaccgaaaccacttgcccagcctccggttgctcacgaaaccaccgctaggctgtcttcaggagttatgtttggttccaaatagcacgtacttgcaaactgaagccgaagcgagttgtaaccgtgcggttacatacaagagcggcgcgtaatgagactttctggtggcgagtcagtagcaaatctgcacacagcaagccttgttagttggtggatacgcgagagcacttcaccgttcggacagacatattatgaacggtccagtggcaagtgtgtgtagtgctcgtgaggacaggccaccaataacaaacccccaatggagacgcataaaccctcgggggcgcatctcgtagaacttgcggtcggccacatcaactacattgcaagttttctgttctccctgcacggcggggttggtcatcacgctgcccgtcgctccaaagtccgtctggccgtcggtggataacacaagtccaccgcgccggcgagcacccgacgggcacgtcgcccactttatttagatcttagcctacgactcactaacggccaaagctgccgtttcgttcgtcacttgctcgtcttcagcacagccactcggtagccgttcgtccgtccaaagtgcagcactcgggtcacttgcgttctccaacgccgatttaagagtgagctctcacgctgagctctcggccgcccaaagtccgtatactgtaccaaatccagcgggcccgcggtcatcgtttgcgcattaggccggccgccggaggtactccaagcttccctctacgacagcgtgccggccgttcgcaggccgcggtcctccagaccagctctcgtcctctgctcgtccgattcgtccatcgttgcgcacatcatcggacgcacgcaattgcagtcctccgcacgtcttccgtccgttcgtccaccgtagcgtgtgcgatcacacgcacacagctgcagcccttggtcacaacttccgcccgtccgtccatcgtagcgagtgctgacgggtgttcgcacttgcggccctcggccacggccgacactcgcccgttcgtcccgttcgtagcgtccctcgtgcgtgcagctggtcgcgccacctgccgccctgttacaacatgaagagatagcagtcgaattgctctagatatattatctgtagcgactgagtgcgccgtggctatcggtaaagtgttgaggtgctgtagtacatgtggcctcaccacgctaacgcattcattgaatgaatttcattcgacacctccgattcattgaggcggggcggagcgttagagattggttttaatatcacgtgaggagttactgacggaaacgctggcacgccaaggtaactgctcgagtatatgttagtatcgagtgctttctatccgcacgggtaggaattctctattacggctctcagtagtgagagccccacttttatcactatctagaggcatcattatctagaatcattcaagggacatgtaccaccaacggttaattggtgccgcgtattgtttgtctgaacggttagctcctgtcatgtagccaccaactgacaagtccaccaatggtgagcacataaatcactgacgaactcggaaagtctcgttacgtggtcgtgtgtaaccaagtggcaacggcaagttgagataatagtcgcgagagagattcaggcctcactccttgtacccacgagttggaatcgagcccttagacaacagcgcaggaacccgctgcatgtagactgtggatatgcagtatcagcggtggtatctaccggtaaggtagtgtatggcttctcttctagcgacccacacgcgcaaactacgcatctgaccgacgacatgtactttccagtgcaacaagcagcgcttatctaaagctttgaccatgtatggtgtgtattgagtgtaatacaagctcatcaagtgccaaaatggccgacacgtgccatgtctgtgccaacagacaagacgctcgtttcaaacatcgttttgccgttcgcaaaggggtgcccctctcaccttcgcctcatcatgcacaagtgtgttcatgcgcatgtactccggtgagtagatgccaagtggtgccgacagcattccgtcgcgggtcagatctagccgatcttgccttgaacccgaaacgcggtggtgcttctgtatcgtgggagacagcaatcctgcgcgcagcttaagttcgtgtatgcggctttgcgatagcgtcgcctgctgcacgaaccacgacgcgctgaggtggagaccagtttgttgatgtaaacgccaagatagccggtgttaccgccacctgcgagttccccgcgctcgcaacgttcacgttcggagcggggatactgtgtgagccccacgcagattgatcgtagacggtaggagcgagcgctacaaagttcttgtcccagaatccacaatcggcgtactccgcgaccagtccaccttctcggatacgccgccgtctcggcctgagcgccaccccatcgtccatcgcgtagtctagtatatctcctccaaagttgaggttcacagaaaaaccatactgctggttctccacgctggcgcgagcgttcgggtccatgatctgcgcctcgtagtccgacattgtgcccgcgtgcgtcctggtctcgagcatctgcgctacgtccacctccacgatctcgtccacttggtgggtcacgcacccgcccgagagcagcagcgtgtgaagctgccgtccagcgccacgccgtacgcgaagtcgttggccgtcgtcccgaactgacagcaatacacacatgaggaacacaacacacaacacaaagacgcatgagcaaacgctgaccatcatcacccaccgactggaagccgccaacgcaacaacctgccgcatccagagcttgtcgccgctgagcgagatcttggccagcaccacgtcgtggccgccgtattggccgaagctgttgagcgcgtggccgccttcgtgcgggtacccccacgtgcagccggccatgtacaggtactgacgatggtgatgaaagttgctacgtcggcctcgtccgtcccccactgccctgccattcacccagtgtcactttaggctagagtcgtccaaggagcgctcgagtgggtcggacgacccacgcacgtacttgtctggtccagccaagcgagtcgtccgccttgacttgagccacgaagatgtcgagctggtcgacgtcgctactgtcgagcgtcttggagcccgcgaagtagaggttcccgtctgcgtcctgcgtgcctctgctgtcgatgcgcacgacggccgccgcttccggctgctgccagtcgaagtcctcgttcgtggccatccacgcctgcacctcctctggggtcaggtccgccgctgcgacgatggctaccgccaccagcagcacgaggaccgacaagccatagcagctggccacgaatgcagacattggcactactgtagtggagcggccttaagattcgtagaagtcctcattcacggtcatccctgaaggcacctccaccggggtccgccgctgccgcgacgatggccagcaaaagccccaggccacagcagcttctcaccgacgacggcatcggcattgaggctggagtcgaacggacgaagaagattcgctcagcaaggggcacccgagcaccgaaaggcggggcgctaaagtgggcaaacagcaaacgctttcactcgccttgcgacctcagcgggcagggcctccgaaaatagcattgtcaataacattatttcagaaaataacaataaatcacgcatttcggcgtgttcagccatctaccgtgataatttattgatgtgctttgtgatattacataatttatgacagttacctttatataataatgttagcgttttaccagccatcttctcgcttccagtcgttcagaagaactggaatcactggttgtctgcgttgctagttgcagctcatttggcagcgctcacttttcaattttcacttctcaagcctccaagacatcatccagcatggttcgcgctatccgcccccctcgccctacctacacgaactcccaagtctcggggttttacttccgcccgtgtcgcgacgagaacgacgaggtgattctcgagtatttccgttgccgttgcggcacggttcggaagcaaacccataggaacgggtactccaacctgatgcaacatatcaggcgggagcaccctgacaacgagaccgtcatgttcgacgctacgacggcggagacaggctccctcgtgaacttcgtccgccactcggcgctcaacctccacggctggatggtttggattgtcatgtgcaacctgccactatctttttgtgagagccgagaagctcggcggtacgtgtatgcataaggtcattgtgtttacattactacggaaactaacaactttactttatggatgttattcagctactccagcctggaccccatctcggaggaaacgctgcgggctggcatggacggggtcgtcgtcgccgtcgagcgttcgattgcgtcggagctcccagcacgcttcggcatcatgctcgacggctggacacacgcatctgagcactacatcgccgtgttcgcgtgctatgaggtgaacggctgtcccaagacaacgctactcagcatggccccgctgctggacgcgctggacgacgatctctccgcgcagggccatctcgagtttctagcgaccatgctgcagcgcgattacggcgtacagctggcgcagtgtcgcttcctcgtagctgacaactgcgccgtaaaccggcggctggcaactcttatgagtgtgccgcttgttggttgcgcaagccaccgcctgaaccttgctgttcaggcggacatggcgtcgcatgaggaggacctggctgctgtgcaggcgctcatggtaaaattgcgtactctcacccaatctgccaaactacggtaagcgccaatgtgtatgtgtggtgtgtcaatatgtctctaacacaatttgtatacttttgtaaattgttttacaaaataggttgaaaacgccacttcggcctgtcattcgccaggacacgcgctggagctctacgttcgagatggtacggcgctacctccagctcctcgagtttcttgacgccgaagacgacgccctcatggacctgctgccgccgccggcgatgaacaagcgactgcgggcattgtaccaggagctgtgcgacatcgagtcggtctcgaaggcccttcaaggccacgacgtcgacctgctggacgttcgcgagtggttcgacgagctgatcgctgtcaagccacaatatgggcgctacattggtaagtttataactgttgaatttgtgttcaatattttcactaataattgtataatggtttttattttgcagggcctcgggccaacattgtgcacaacccagattttgaggctgggtgtgtacgcgttctccgcgggaaggcgcagcggctgacgcgtgctgaaaaggccgctttgcagcccttcgaagctgccagaccggacgacgcggccgcgagtgaagaggaggaggatccagccgcgtcgttcgtggagcgtcttcggaagcgccggcggcttgcacaggaccgtgtcaagtatgagcagctgaagagcatcccacccacgtcgaacgtggtggaacgattcttcagcattgctcgggtgacgtttggtcatcaacgacacggcctgctgccacgcacgcttgagacgattttatttctccgccagaatcggtcgtactgggatgcaacgactgtggacaatttgagctagatgataagctaactggtgtcttgttaatagacttcaggcttttcataatggcattatttattgtggtacgttgggggcaacgccataatgtactgttgtattggtaggagcgtcaggggataatttattcagcaacgcccaacctactaaataaaaatgccatattcggaggccctgtcagcggggcgcgttggcggtgttggcggcctgaggtttcactgtggagggaggcggtcgctgcgggtctgctgttccggctccgcagaaggcgcaagtggcgctgaagatgcgacggcgcggccttcactccggacgtcgaggcggacgctctgctgctgcaccgcgggggtagcaagcacaccagtagcagtagcaacagcaacagtggagccatcaagccgaggtgcactggtgcacgcgcagcctggtcccccaactcgtaacaccagcagccatggcgtatggaatggtgtcgcccgggacactcatctgcaaggggcggcgccaacgcgacgtggccccacttggctttcacctcccctcggactggaatagcaagcagcacctctccttattgaatgttggcgtgtcacaacaacgattgtgattggctaagaattgaatccgacctaaaaggcccctacatggaatatattcggtacagcatacatacatgtactaaattgcggtaccagattgaaaatcgtttgtcacgatacgcgcgggcaacttctcagctcgcgaagttgccccacgatcgctttctttaaaaacaaaacaagcatgcttcttggattacttgtgttaacaatgaagccttcgaaaagtatgtgcagggaggtgtagcactgaggtcttaagataccgggttgctcgggttgcttggtccgctgggttgctcggtccactgggattgcttggtccactggggttacgaggtccactggggttacttggtccactcgggttcgatggaccgctggggttgctggggttgctcggtccactcgggttgcttggtccactggggttgcgaggtccgctggggttacgaggtccgctggggttacgaggtccactgggattcgccggtccgctgggattcgacggtccgcttgcgtttgagggtccactcgggttgcttggtccactggggttgctcggtccactgggattgcttggtccactggggttacgagggccactggggttacttggtccactctggttcgatggaccgctggggttgctggggttgctcggtccactgggattgcttggtccactggggttacgaggtccactggggttacttggtccactctggttcgatggaccgctggggttgctggggttgctcggtccactgggattgcttggtccactggggttgcgaggtccgctggggttacgaggtccactgggattcgccggtccgctgggattcgacggtccgcttgggtttgagggtccactcgggttgcttggtccgcttgggttacgggaaccgcttgggttgctaggtccactggggttgctcggtccgcttgggtttctggggccgctggggtttgaggatccacttgggtgtgagggtccactcgggttgcttggaccctttgggttgccgaagttgtaggggtgaccggcagtctcaaaactaccacggttggatggacggaaggggttgctgggattgcctaagctaccgtggttcggcgggtttccaggcgagcggcgaggcgtggttgtgctcccgtggttcctggcaccgtcgcggaacgactcagggtgatcgcgccactgcggctgaggaactggcaccgaggaataccccaaatggtgaggcgaccggggtcgcgcactagtgcctgatgccacataaccaccattcgcggaacgactcagggtgattgcgccactgcggctgaggagctggcaccgaggaataccccgaatgttgaggcgaccggggtcgcgcactagtgcctgatgccacataaccaccatcgcggaatgactcggggtgatcgcgccgctctggctgacgcactggcgtcggctgctggcgcggaggctgcggtagctccatggtatggtagtgcggcggcggtgattgccagcggcgaggtggctgcgtggcatggtggtggtgcggtggcttcggagtcgaacggggtcgtccgttcctgtcatggtcatgtccgcgatcgcgtcgttgcggctgggccctcggtggagagtattgctgcgggtggtgtggtggtgcggtgacgacggcctggtagccatcgacggcggcacctccactcgcaagttccgcacgacagacttcgcctccgtattagccgaaacgtcggccgaggcaaggctcatgaaagcagcgatggtcaatatggtcacgagcttcatggcgggtggtggagggaagctctggctgcttcggggtagaggggtacttgggccttggaccgagttggtaaattgaagagtgagattagcgtcggccttctgttgtccgagaggcttttactgttcgttcattgcaaacagtccggccggggtcggcccgctggctggtagtgctggaagcggttgtgcagcgaaatggccccagtacggtgctcgagcgtctgttagtctgatagcgaatcagcccgcctccacccacccgaactcgagaggaagctcagtctgcacaccctcaacataccgaaacggattagcgagtccgtgtacgccttcggtcggtcacaaaaccaccgctagcttcggccgcgactgtcttcaggagttgcgcttgtatgggtgcatggtttcaactaacgcgtatttaccgagcagttaccgtggggttacacacgagagtggtgcgtaatgagactttccgggcggtgagttagtggcatattgcgcacgccgagaccattggtggccttgtcagttggtggatacgcgggagcaactaaccgttgggacagacaaattacgaacgggtccggtggctgctgtgtgccgagttcgtgaggacaggccatcaactaacaagtactcaaagagctaacgttggggctgttagcgttcgcggctaagtgcgaggtggctgtcttgggatgccgaccttttcggacgtcgggagttgttgcgctctttcgtgattgaaatgcaggacagatactgtaaaaactgcaattatgccacctccctttaatagtggacgcctaccaaaagtgttctaatcaccaggcttcgtcaaactaggatatccgtcctagtgcctatattaccttaatgaaggaaggctggggacccttaatataggatggatctctactcgatacttaatgaagcggatgaagcctaatcaacgactgcgctgtgcgctactttcactacagtggctacagtaattagtctgggctcaaaattagtctggcttcaaattagtctgggccagactaattcgtgtcgagcaaaaatggacgtcttcattatcagtctggctaaaaatgttcataattagtctgacgtggtgaccacgattctagtccacccccacctactttaaggcaccgcatgctgaaaaacgcctttgactgcagccaatttactagatctcgtacaatatctgcaagatataatagatacctgggtatccaacccatatatcagccttctctaaccattagagaagcaccatctgtgacgatttagtcttgatttctcttcaaagccacgataaagtatagctacactataaaaatactaaaacaaatacgtataaacacatcatttcacaaaaataatgggtttcttactggaaaacggacatttttagatattcataattaatctgaattcaaaattagtctgtcactgttggggccagactaaaaattgtgagcgatcaaaaatctggtattcagatttagtctgggccagactaattactgtaggcacaatataagctccaagtactgcgaagcatgtagctcgtcttctggcgagaaatcggtgagttgaccccaatgctcgctcttcatgcgtttcaggatcgagatctccccatgtctcggttgttttgagcctagataggcggtcgacattgtttccaaaccttcgatcgacttgatactcttccttcaagctacgatgctgggcccaaattttccctaccaccgaatcgccgtactgactggtaaatcggtcttcatgcctgttaaatgactcggcaaacgcgccatgagtgattctttacgagtcgccatggcgtatactgtgtcctgggcggacaacgtaatgcccaggaccccgtcaatagatccttgttcagcatcacgaactacgagaaccaagccaaattgtctcgcatctcttaaagttcactcgaaaacaatgacgccttacactcagtcttcacctcacttaagcatcagggcggttctggagcgttgtcactagcttattgcgggccgagtacagtactgctcggatagagtgacatgtttgtactgcagttactcaaatcataacttggctggccgcgcgagatccgtgaccacagacaaactatccacctcaaactgatcgaaagcgagcaacccttttcttttcgcagcgcaaccgattttaatagttgcgcttgagtgtcaaaaactcgcaggagtcatagatagagtcccaccgggtttcagcatagtgaagacagctccctacactacgtttggtagacacgtgcgttcacgtgaaagacatctctgaacctaggatcgtgcgaaagtcacaacaaagctgtctaaaaccaagagcaattggttcatggccaggtatagttcataacggaagccccaatacagtctagatcactacaattagtatgtagccatcctgttaatacaggacgctggcagagccttacttttggaagtgcgcccaatttatgttcctccatcctagtttgacgatgcctgctaatcacccgccatatctgcagcagatatggcggggcataacgcaaaataaatctcgtgaggcgtaaaaatcatctcaataaacagacctacccctagacttatgcagtgaacccatcttaatcgttgatcttgaagtttgtatagtctatgccgaccatcactctagctgttgaagctgtcatatatcttagcatatctcatgttgcgcccctcgccttcggctgctcacttttgaaaatcgtcagctgagcaacaagccgcgttgcccctacaacgaaaggtacgcgcctgtgcacgcatgcgtgtatttgttcagttatactaactgctttctctactgctagtaactatggcccgctcaactacctactggcgcgtccgctgcatccaggactcgagcgacgaggagaacaccccgccgaacgtggtggcccaaggcagcgtccgcggcgaggggaggaatcaccggcccagcgcgaagaagacgacgcccgcggagagcgacagctcgacggggaccgcgactccgccgtgggtggccccgcagcatggcctccgcgtgcctaaggcggacacgaacccagccccgcccgagacgacgacagacgccgcctcgtcgacgccgccgcccatgcgaaacccgtgcagccccacgacgtcatctccggtcctgatggagacgccgccgtcgccacccccgccgcgcacacgaccaaggcccccgcttcgagagcgtcgcagcgcccgccaggagcgccgagctgctgctggtccgtacgcacgccgccgtgaacagctgcagcctccggcttcgccgacggtgaacccgagcggcctgatgcgaacgagtccagcccctgctgttcgcgcggagcctcgtgtcccccgtccacgcgaccgactcgtcccggcgcagtggccatttcgcgtggctcacctccgtgagcaattcaacccgctcggcacggtcttccctgcagtgccccacttcggctggtgtgactgctcgtcttcgtgccgagtgaggagctgccgcaactcgttgatgcagttgtactgcaatcggaagtgctgtccgtacgagggcatgtgcgggaacggactgttggagtcgacgaagagaggaacgcgcgaacgcggcagctgtctgtggtggccaccgacgacattgagagcggcgaggtgttgggccagtacttgggcgagctcgagcacgtgagcgtcgcgcccgagaaccgtccgcgcaacgagggctatcgcctcgtcatgaggcagagaccagagacgcccagccacccatccgcgttgcaatcaacgcccagcacctggggggactgatgcggtttgttaaccactcgtgcgagccggtggctacgttccacgaggtggcaaatgggcggcgaacgacggtcgtggtggctacgacggaagacgtgctccaagggcaagagatcacggttgactacggggacgacttgtggtttgtctgtcgctgcggcagcgaatcgtgccgccaccgcgcgatccaggaccagcgcgacccgtaggtggaatgcagagaaggtgtagcaagtgatgaggagagatgtgttgcataggtaagcgtactgtgatgagcatgtgcaagaaatccatgaatctgacaagcatgtttgatgttgaagttgactgttattgctagaaaatggaacttttgtcttcaacgtcgattgcctagagccttgtttggcgccaaaacgaacggtggcctggacgtgagtctgccgtggtcatcgcgcgcgcgcggtttgagcgcgaactcgcgcactgtgttggctcttcattggtggtggtgcgtcgaggggcaattatctgtggtgttgcttaggcggccgctgacagtgcagcggctccttgcgatgtcattcctgcttttaacaagcaccgcccaagtcctccgcttcgagcacaactactccccacccccaagccctccaccgccgttcccggtacgctgctaatgctgctttgcatgcattgactacgtcgttacactcacacgctcgtatgggttctgtagatggctaaacttactggaagctctaactacaaggtgaacgaggttcgccgcctcctggttctcgtcgccaagtacctcccgcttgggcaggacaagtgggagcgcctcgcgagtcacttcaacgccaaccgcggccgtggcgtcgccgagcgcgactacgtaagagggcgctcgcacgcgtgaccagcaggaagcacagcgctacccgaaacttgctaactcctccaataggctaggagggggaaacctggccgacttccgcgacacagtcggccgcaagcgtgcgtacgaggagctgaccgaagccagctacgcgaaggcaaagcgtgcccgggctgccaaagcgacaacggcgctgaagaaacggctgagcgacctcgagaggtcagccagcaggatgggaggcaacctcttcgagatgatgctggtgatgcgcgaggagaacgaacgcaaggccgaggcccgacgcatggaggaagagcagcgccgccgagacgagctcgccgctcgtgaagcgcgttacctcgcggacaaagcggaagcggtggagcggcggcgccaggagaaggtcgagatcgaggagcgtgcgcgtcgcgacaaagaggaggcccgtgcccgcacccaggagctgatgctgctgatcggcgcgctgacgaagaaggactgatccacgcgcagatgcagagggtgcagagaagtcaaaagcaagaggggtagttcatttgtaccgtctacatgtccaaagtaacccttgttagcaaaacgtcaacagcgacaacagctaatctcaatcaagacatgactatcacctcgatatcaattggtttcatgcatgcaaattaggtctcggcactttgcggtgcccaagtcaacagagagaagagagaaggaatacaagatctttgatgaatatccatgttatttactcaaagtcaaagctacagcttgtacagacacaagcgttcgtcatactgcggcatcgccatgtcgttagtgaaggtggtgcgaatctcagagattccgacggtgcggacgcggatgttggtcatgcggaacatgttgttcagcctcacacctcgtagctgctgatcgtagggtatgggtaggtttacacggctgtagaccttttgaatgctccccatgccccactctgcagcctgcctcactgaggcgatcgcgttgtgcagcgtgcgcgccgagctgcgcaacgaggacaagatcctgtccaagtcgccgtccttgaggggcgtgaggattcggccggtcatggccgtggagcacgggaaggccgagtcggagacgacgttcaggcgcttatccgggcagaatttcgggcccgtcagctccatgcggaactcgagcgacgtgtcggagtcgttccacgaccccgggcaattatgcttgcaccagatgatgcagccgtcggctgcgaaacagatcgtcccggtcacgaagcctgagtgcagccatccgttgtacattgcgttttgttgatcggcgctagatggttgctgcacctgtacagtacgtcaagaataatgttagcaaacaggtaaccaaactaataaaacacacttacagtgttcatacgtacgcggaagtttttgccgtctgtgaagccaaatgtatgcttcagtagcggctcccgtgcctccatcagcttggccagctgcgtctgacgagaaggcgaaggccatgagatgcgcgcgggtgcgtagccatccaacgccttagcaagggcctcctccgctcttttcaacgttctcgataacgtgctgggtggcactccaaagagcatgcacaaagtgctctgctccatggagcccacgtagaagcataggacgaggccaagtgcctggtggtgatagcgtagcttaggagggcggccctttgtcgacggctttggaatgtaatagaagctacaaaagcggctgagaagctggtggaaggcggtcctgcgcatgcatgcatcaaatagagtcaattctgagaaaacaatgcgcgcgtcattcataccttaccttgttaggctagttgcgtttaggacgttgcggtcgtggccgctggtgtacaaggccatccacgcggcctcgcagggcgtgtcgaggcactgcgaggtcaggtagtggcgcgtgcgcaccgcaaagcgccacgcctcctccaccaacgcgtcgtgcacgtcacggcgggcctcgtgcagcttcgcgttgtgctgcaggtacacctcgcacagcagcagcatcgtgtcctcttcctcgctcatctcgtccgctcttgcgtagctccccacccgacgtgaaatggcgaacttcaagcgggggcgaaatctggaaggattgcgcatgttttagtgtcctagactaagtgcccggatacaaatgccattgaatcgtatcagtggccgaaggggactaaatagaacgatcggagatgcccttaaatgtcttttgtggtggagcaaatttaggataagccgacgtactcggaaataagaaccgccatatctgctgcagatatggcgggtaattagaacacttttggtaggcgtccagtgccccaccccatgaaatttgacgtctttggctggggacttgcgatagtgccgcaccctcaaatagagccccaccccaaccttttatttgaaaattgagttgattctgagtttttcctcataaattccaaatatttcacatcataatcttaaggtttgtatgtcgacttaccaatggcagtgattactgtcaaatttattctgtaaataggtttttaacgctagttgtttttggctccccactccctttaatagttccccccttgtaataatgtcctaggttggcaggggggtactgctgcaataccccacggggcataattaagtttttacagtatatcgaataagtaggtgtgaaataaaaaaatcaatggagcaattcccacaccgttttgaatcctagatctacatatattgcaactctgtgattggtcgccaagatttaattccgccctttcttcgcatttgcgagaaaatgtataaatcgcagttcgaagaactgtcgattggggaaggtttttggatgatatcgaacgacattcacgctacattcgtcacttctcccccgtgcggatgacatcaaacaacattcacacaacatgatacagcactcgatcgaatcggcctgaatgacacttacaggttttgatggatgcctattcgcctcggagctttttttccttctactgtagattgatgtcagatgccatcagaggaagtggggctccatcataaacatcagactactacgacgaacaacgtattgtgtcttagcaagcattgtattctttcgatcaatatgaggcatcggtgctaatgatgctaaccttggacacaactggtgcaacatcactgcatcatattatacttactactgtacatgcagcttcaaagtactcaacatagtacttactgattccattagcggtaaagttatcgattcgatctgttatgcgtcataacttatactctcctctttcagacacagattttcttgtgcatgcatagtttctgagagagagagagagagagagagagagagagaaaatcgtgtagtcagctgagtttgccgtgccataaactgtcggcgggctgatattgtgtgaatccccacactcgttggaattaatccggatggatagataaaatattccactaaagccttgcaaaaaactacttaaagttctaggttgtgcgatccaagatgggaagtatagctcgatttttttttcgttcaacatagtttttttaatccaaacccaactcttccccccggcaatgcggtgacgacctatacggtggcgaacgagttcattcagcggagactcaaaaagagctgcacctggtggtacgtcttctccggaaaaaaggctaaaagctagctgcagtagcttaggcatttatctacgaagacttggatgatttaagcttgtcttgtgtgaggctacaatgcgacccgcagagatccaccgaactggtggtgtagaatgatctactacttgatcctgttcttgtcaaaacgagttcaaagtacaatctccaactatagtaacttcagtatagggatttgtactccggcataaccagctcggcttaccatttctcataacaatgttgatcggctcaatacaacgatacaatcaaacaggatggcgtatcaacttttttaaacagtgaaagcgtggcatggggaagaacgaattccttcgtgagcttctggatcaagtcttggacgtcactgatggaatccctgcaaagcatgtaccatgcagcagcatttcccctgaaattggcgtcatcatggcaatgatgcgcttactctgattctcatcttgccaatcaatgttcttcgcctcaaagtaatgaacaacttggtcgaaatacaactcaaccgagtcgcccatgttgccatagaagcgaggtaggcttatgccctcaactttgacttccttgcgttgcgaagtcaaaacgtcgattagtgcttgttgcttctgcacgatttcgaccacagactgggtcagacggtcagcagaccatccaccaggattcaacgaagtcatgatagtgtaacttgagcgaaaagctgattaaagttacgctacgaatgcaagctactagctactagaactagagctacgatgacactgtcaacaactacgcgaaacgcgcgcgcttgatgctgatgatgcgatcaacgaaggcacgaacttcgttgtcgatacggttgacacagatgttcaggttgtcgacggtctcgtagagaaacagtccaaactcagtctcgatgacacggtcgaggtgagtctcgaaaaacggaaagaacacttcacggaggtgatccgtcaagcaattaacctcgtactgcaaacgggtagcggcacggatggtgaaagcgcgttgaacggcttgttcgatggtgagaatgcgacgatgttggtgatcttcttcccactcacgagcagtacgcttaggcatagactggaaaatacccgaagcttacgccaaagcttaccagatacttgaaaattacgcgaaaaaatcaggaaacagctgaaaattacgcggattctccaattcggaattaaacgggttctggggtttagggtaactactgattggctgagccaattgtaattgcactaaaacaatgcgaaaaagcccaaaaacttcacaaattaacacttaaacaacactacttagagctaattcaagcgttgacgcttggacttggaaatggctgttttctggctgaaatcctgaataagtagctcttcctcttgagcttcttcaagcgctctttgacgcgagctctccttaagttcacggtcgaacacagtagtgagcgtgttatggatacgcactacttgtaaacttaggatgtggcaagcttcttgataaagtatacgctcggactctgagcgaaaactcccctcctgagcctgcaggtggtgagtcaagcttgcaaggcggtttactgcaagtaacccctttaaacgaagtcgatctactgcttgttgacttggttttgggtttggtttacctttttggttgttcaccttggtcattcaaggccaagtgaaacaaaggtttccgcaatatactaggcttacgggcgtgaaggtgtctagtgaagctaaaagcgttaaactagtacaatcctccgaataactaaccgttagcgaaaagcgtaaggctagtttagcaacaatcgactagcgaaaagcgttaatgtcgactatgcaagacttttacggctagcgaaaagcgttaatctcgctaagtcagagtgcacgtagagaaccagttcaagcgaaaagcgataaccctaacccggacgttgtagcagtagtcgagctgaagccgaagtagcgaggcgagtcggttggagctgcaaagagcaacgttatcaaaagagcaacgttaatggttacgaaaaaaaatataattgtcacttttgaaacgcttttacgtgagcttgatcagttatctactcttacaagaagaactatgtctcgttgtcgaagaagtacagcccagaaaaccattggcatccgcgataaaacgtacccatgcagagataaatgaatccgagcaccagagtattcacatctgagtctctgttagcatactttgcgctcacaaaagtgtactcgtggtgtgtgccacttcagaactctcccaccctcacatctgaagtcctcagtgagcgcacctcgtgagcctactatgtactcattcaacacagataatacctcagaaataaattacctatgtgcaacacacgaggaatttatccgataaattacaagtccgaccatgtcctaccatgtacccatattctctggattttatccagagtccatgggcgaaggccactgaggtgtcattattctcacatcaaatacctgctaaatatggttttgaaagatcttaattttacacctgatgtcacctgttatactaaatagtatgctatctaatcaaattatgctgttatgttgacccatccggttgagattaagtcaaactacctactattttgtataccctgtaatcatgtatatatatctatgacaaacgatttatctgctccctcaaacgacatccgtcggattttttcgctcagacaacatgcagaggtgatgggatcttcgttgccgtgtggcaaccaagtgagcgtcgaggacagcgtagagaagacgcggcgctaccttacgctcgggattggcaaagcgagcgtgggggcactgaccgagaacggcgccttctcgatgctgcattgcgtctggttcatgggcaatacacagctcgcctaatgctgctgtacggggcctacgtgctcgcgctcacgaacaggcctcccgaaaatggcattaatagggagtagccaccgaaggcaccagataaataatgcatgtaacgtattgtgctttgcagttattgtgccgaccattttagacgctaaatatggcaaagcctgctcttaaatacgtgtgaaagaagatacacgacctgctaaaattatgcataaatccacctcctcatatatatatcgacttgggagggcctgtaagcagccatgcattggcccagtacaccaccgtccatgatccccagcccatccaccctcttatgcataattgccgtgtgtgtaggtgcttgtggataaaaactgacagaattgaagctgcacagccacaattgcactttcaaaagtgcaattgtggcgcttttagcgtaattctaggcatccacccatttatgcacctcgatttatcgtaaatctagcaggtggtcgctataaatacagcaaatctcgcctcatattgccaaaatcattgcaaaacacaataaattcccgaattaataccccttacccgtatagtaccctctaaaacgtaacccaatgtgtatcccagggttacaatgttacttccatacaaagatcaagtatatatttatgaatttattgtcgaaatcatgtttatactgtgtaatatccataatttagcatatttgttttgaaaatgggagggtactaattaatagtgcccggggtattattcggaaatttccgttagaactcaaacaaggaaccatacataatggaaaatgctgagaccctcgaagcaatattgcattaaattgctgctagattaaaacacctaaatgctttcatgcactaactgggcatcccagtaagacctgtttacctttaagaagaggatcatctccatcgactacgccgaaagtgagtggcgctccaggctaaaagccgatctcgccatgctgaagagacgctcggccaggttggaggtgggagggatgacgttgataagatcgtagagcttgtcatccgacgtcacccgagcccgcttcagcactcgttcagcgaaaccttcggtgccttgttcctcgggctcgccctcgttcgcgcagctgctggcgttgaccacgaacggccgcaccgccattttctcctgtctggacagcgcgtgctggttctcctgctgaatcgtgacgcacgcagactcaaagtcgggagacgccacaatatccgcccgtggtcctaaaaaatataagaaaacaagctagaaataataagtagcagcaatagcagaagcaataaacgcgtaccaagaaattgcttttctcggtgattagcgcgtcgaacatgacccacacttcccacagcgataccgaatcggactgtaaacgcttgaacactgattcgaaatgcttgaggtcttccaggaggcccttgagctttttgagcacgctgggagacgggagcagctccgctacagcatcgtcctcgcggtcaatgaactccaaaagccgcccgtaacggtcgagcatcgcaaaggtggagctccagcgagtgtcgttgcgcagcacagggcaaagtgtcgtcttgaaactaatatatcagtttgaaaagggttagtaatctgaaataataataataataatgcaattgtaaatagtattcaaacagtagtaaccataccgtagtttcgccgcttgattcagagttctcagcttgactatgagcttctggatgccagccagcgcgttctccagtggggacgtgtacagacggactgccaggtttagtcggtgactcgcgcagcgaacgagcggcacactcatgatgcgagccagacgcttattcacagcacagttatcactgatcagaaagcacacctggttaatactcttaccaaacctctgcagaatggtggagagcgctgccaggtgcatctccgcttcgtggttaacctcaatagccggcgcgtctttgcttggaggctgcacaactggggtgaggcaaagcagcggggtgtgaagaacaccgttgagctcatagcaagcgtagacagccatgaaatgctcggaagcatgcttccagtcgtcgaacaagacgccaatcttgtcaggcatctcacagccaaccttcacctcgacggccctgttgactgcctccatgtcgccacagaatgtttcgatgcagacctgacctaggttcgcgtatctgttgcgacaaattaatatccatcagtagtaaaacagtcgagagtatattaaacgatccacgctcagaatagtaatgaaagtacttaccgccgggttagcgcctgctcgcaaaagtcgaagggcaaggtgcccatgatcacccactcgagccagccgaaccggttcttggccttgtggctgatccagggcaggatcgaacccgtcgcaccagacccagccgagagtatgtccgcctcaaagccagaggagcatgctgggtgaggttgctgtagccccgtccgacagcctgcttgagcacacactggcagaccttgcatgcgaagtactcggtgggctcgccattgccgtccaggcacggcgagaagaacagtgcaacttgtttgttgctgaacttggggcgagctcgagggttggagggcccgaggttgagcattgcagcaagcttggcgggcaaagggtggtgttctgtctgaagtaaactgaaaagtgagcggaagtggcaaaagtactgtagtggggccaagcacttgaccattgtggtccgtaggccggaatggttagtgtggagaaaccggagaaaatagtaatatgagttttatggttttctactaccacatcaattaatcattaatataatattggtgcagtattaattgatgcatctgctcagacttctccaataaataattgcgtgaaaaaaatcaattaaatttctactaattgatttttcgggaggcctgctcacgaacgtgcgtggcgcttgatgtctcttttgcagcaaggccactcggcgctggctctggccgtctggagaggacacatcagatcatcgagctgctgcggtgccaaggcagcgtggtgcccatgaaagagcccgggggcttgaatggcaaggtgattccatcttggatgccgtcgtcttcttaatgaatgaaaggagtttccgaacatgatacccagtaggtaagttgatacctcactttctcattttgattcggcaaggcgaaccacagacagtaaagtgatgtctactagttactacactaaccaggagttctaccttccattcgcgtgttagaaatctaatcaaatgcagcgctatggcccgctttctcgcgttgaactagttgtctgctgaatactatcggaaagtagtgatattactactactactactactatatccctgctatatccctaggatctgggcgacttagtagtgataatactggagaccagtccgtagtagcaaaaaaacgtcattcgtagtaataatatcactactattatcactactatttttccgaacttcaacacaccaaggatcttcaacaggtggttctgcaccccaagtgtttagtcaagtcaagtaagaacaatgccacagagtatcatgtttttgagagtcgagaatgaagtgcttgaatggtgcacaagccggctgcatgtattaatatcagccatattccctcaatgacagccaatctgagcgcactcttgttttttcgccaggggattctagaggcaggttcgccagccggtcgcgcctcgacaaggttttctacacggacaacgactcccagctacccgtcgtatcgttcgccaaaggagcagagcccacttaccctcaagctcctgatcgtgtgagagttcatccatctacaagggtaatgtatgcatacatattttctgttgtgtgtgaagacgaaggcatgttctatgattcagggagccaagtgcaagtatcaggtgatacggctgattggtgacggcgcgtgtttgaattactattatgctcataactgctaaatcttactatggtgtctgtgtgccactcgcaatgaagcaaacggactcatcctcgttgttactggtcagttcaccaggccgtgtttgctcaacagcgctgctagaacgtgagtttcaactgatgaaaccatccccaacaaggactagagcccaagtacaactgatactgccctgcaatcaaggaaacaaacgaggaaacgatattgtggggcagtagtactatagtagcgcaattgtagtaatatttgtactggtaactactaatgttgcttcttacctactaatatagatagtagtgcttatgaatctggcttcaatagtttcaatagtagtaactgtatcactactagcctaaattctgactactaccgaactctgattgtgaacgggtcggaaaatattaaagccatcgcctacttgggcttccgccgcctacaagtgcgaagtgttctgcttgaacaaggtgaccaaaactcagaagaaatatagttacgcttcaataccgtctattgcgctctagctgtacttctttctgtgactggtatgatcttacgtgaaaacactacgcggcggcagtacaggtgccattaacttacatgcccaagagcaacatgaaatccagagctgttccgggcagagcacggccttttgctaataacgtcgcaataaggccctagcgttgccgtgaaagcgttgtgacgttgtaaaatgatgactgataacgttgtgaactaacaatctgatgattatatccctgtacagagtcgtcttcgaagtaatgagcaaggaacatcaatacgcacacacgaataccggcatcctccgttctttactgacgttcgcttattactgacaatcaattatagccaatcaaaataccttattgtcatcctcctcttttaactgacaacacaaaaatgggtcatttcccaatccacaagatgatacctgctcgcaggcgcaccgcaattacggcagcagaaagctcgaggtgctcgatgcttgggcacagtgcggtgacatcaccgcggcttttaacgccttctacagcggtctagatgattttgtccacgaaccgcggcgaaagctcatggacagacagctctcaaaaagaatgctcggacgagcggcacaggtatggccctccccgctgaagctgagcaggagctcgtggtatggatgaatgaactgcgtggggagggcgtaccaccattcggctttgatgttgcacttacaggccctggaagcaggcgatgactacatgtatgtcacagcctttagtgaagaaagtagacgttgtagctagtgaaattatcgctcagctttctagcctgagtctgatagatcatagagtttgagctgtggctgtcgagcatgataccatcgcgatgaaacaatgagctttttgtgtgtttcacaatgcgcggcaggcatcacttttttacccactttttgtagccaaacatgattcatgctctttcgtaagacgatacttagtaagacaaagcgtcttgcaaccaacgcattttggctacatcttggttttagtataccagtggctacattgtattttgtccgtcaaaacgtaagacagtttgtcggacaacaatttgcaccatgcgattggccaaaactttcagagagtagtgtcgttgcgtgcgctcctccgttgagcatgtaggaacccgaggacaaccgctttgctgtttttgaattgctcgtgccacctacagtcgagccgacgaaataaggcgctcacaagcacgaacatgtagtcggtagtgcggccctactgccaactacaatgtacacgcttgtttgagaatggttaagaaataaatgcacccgaaccattagcccagcttgacaaacataacgttcagggctttatagtgaattctagttaatgcataaccaaatagagcccctcttcctccggtagtgcggcccacgaaccctgtcgtgtcctctgaggacgcctccgagcgaagcagtgcacgacgagcgcgcacacatgctccgcaccgaggcgttgtcggaggacgcgagggagtagacaatcaatacattatgggatcttaccaaagtcatgaaatgaactgttttgtagtagcaacaaggcagcgtcaaccagtcttggtatttgtatttatatttgttgcggtttgcttggctgccttactcccggaggcgcacactgctgcagctccacctacgtcggtagtggacaccaccgacctcacccgcggccacgtgtaggtaagctgttggtggtgtcgcaaacaaataactacaaaacggcgtgagggcctctaagagtcaaatgagcggcgaaacttctcgggaatacatgaaaatgccaaagctaaagtaattgatcagcctggctgaaggcgcttaccagtttgctcggcctgctactgtagtactaggaaatctaaacgatctaagctcgccgtggtgttttaaaaatgtagagggagtttgttggtgtcgcagcgctcctccgcacagttctatcgaaccgccaatcattactaccactactatgctgcgcccgatattagtcagaatacgaagtgcaacgaaatgcatcaaaaagagtagcgaagaggaacgcgggccttcctagcagagcctgcgagcactctgcgcctggcagtgccaacagaattggcaggtcgtactattcgccaatcaaatcactagatttgatttgtcgtcaaactgtcttacgaatgctcgacacaagtgactgtcagtattactgactcagtaaagaacggaggatgccggtacagtaggcgatagaaaggtctagcttttagggataaagccaaatcacctccaacgatctccagtccttgacgtgaagaatctcgcttttgtccaagacgctttagctcaagctggactccgtcaaatcgacagcgggctggacacacaactaatgaggaaggggtcacatgaacggagtctaaggttggctaagataattgcgcaggcagcgcagagcatctcgcttgctgcaatcgtctaaagtagcagcacatattagccatacacgccatgtgtagcaaaatatatttgtgtcgctaaggggcgcgaaagggtacgagcggtttcacgagggccactaacagtcagcaacgcaacgacttggtaaccgatccgactccagacaaggagcgcagataaggaccccgaactgcaaccatccccgtgtactgtgctctcaagccagcagcaaaaggctattcgcatgaagggacggacgttcgctctcattctccaatttacaaacttggggcgagatccgagtgaccctctcgtcgtcggggtagaagtgggtagggctctgccaagttccgagtagcagaaagcgccaccgctccaccgtcaacaatgaatatcgcgacggtgatagtcgtcgctgctttcctctgctttacctcaaactaatgcatcagcgcacacagagttcaagtcaatgacccgcaacttgagcaactacaggcacatcacgaggtcccgcgatcggtgcgaccagaggctctaccccaagcgcggcaagatccgcaagctccagcggcataacaaccttcacgagtaccgggacgacaacggccaccggcaccggcacgacgagtggaacgagctcgaccacgacgacggggactagcaccagcacggcgacgcgtaccggaacgactaccggcactggtgctgggactacaaacggcgcagcaacaagtagaccaagcacgagtggtgggcggccttaaaccgacgttcattaaccagtctttgttgacaccaaggtgctgtagcggccgtggcgtctttcaacattgcttttgaagtgttctgggtggctactctgccctgatttcacattttgctctgcttgcattgctacgtcttgacttttacatgcggtttgctttcattaattcgcgatagggtttcaatcaaaatcgtgttcgtttataccagcactccttatcacacagggaaaccctggaggaaagaggatctcaacagaatttctaattctaagacggatgtcttgcatctcaataaacccggttttatcaatgtagaaatatagcacacgcctccacttccatctaagggctcttgaacccaataagctacttgcacgagggctcagcgtcccccttttgcttgtatttcaatgcatgcgtccaccattttgcattccattcgtgcaacggcagacgctgcttaaacaacaaagttacttttgtacccgtgtactcggtcagctggagcacatcgtctaagacactggcagatcctgggccttgatgggcgcgcgtggggctgcaagaactggcggcttgagtttgcgcttggtgtcgagcagatgcaagtagttggcctgcagcggcgtggacttgctgagcaccagctccgtctgagccagctgctggcgcgcaagacgcagctcctccgtgagcgcagcgtaccgcccctgattgaacttcgccttggccatctgtcgacgcaagcgccgcgtgtaaacatagtggtagatgttctcgtactcgtactcctggttggtgatgctccaccacgcgtagccgatgatggagactccgaagcccgtgaagtacgtcactggctccatgatatcccacgaaaagtggataaacgacagccagaagtagagaccgaaggcccccaccaacgacgtggacagtccgtacgcaatgacgttcgcctgtcgagtcgcagtggcctccaactcccgtcgcaggttcaccagcgccacgtgctcgggcgcgagcgcctgaatcttggcgagtagagcttcgcgctgctgctggaagagctgcgaggacagcggcgagagtccgatggactccaggtacgagtccaggatgctgcgcggttgcaggaagaccgagtggatcaagtcctcgtcgtccgacttgccgaagtagaagacgacgcccgactggtggaaggcctgcagcacctcgggcgcctgcttcttggggatgcccctctcctggcacatgtgcagaaactccgggtggctgatcttccacttgccgagccgctccaggtcgctgcgcagcatgatgatggccgccttctgcgccacggagcgcacgtccaggtccccgtcgtccgccagactctggtacgcgctgcccgtgaacaccggcgcgcgcacgggcagcacctggtcgttcagcagcagctcgaagtcgtccgtcagcaccttctgcagcgtgtcctcgggctggaactcctcccccctggccgagcggatggctacactctgcaccgacttgtcttccgcttcaatctgcgcaatgatgtcggccaccgtcgtctctaagcaatttaataaatcataataaataatataatgtaatattagaataataataagataatttaataaagctttcttttacctggcgggatgctgaagaccctctcctcgtcgaagccgttgagcggcagcggcacggccagcgtgcacgtgccgtcgtggtacttgagctcgatagcgcgcgcgcggccgtactgcagcggcgcagagctggcgatggctcgagcgacctgcagcgacggcgagcggcgcgagaggaggcgcgcggaggcggcgccggcgaggagaccacgacgccacatgagtctgtctgtctgttggggagcctgaggactttagtcagtatggattccaacgcggcgaggtgacgattagtcgatggacttcggctaagtacgctgatgtggtttgacgattggatgaaaagcggaccaatgggttggctggaattgcggcacttcaactgtaccttccacgtgccgttaaggtggagtttggctacagcgcacaactccagactaaagaacgaacgagtcggtgtatcatcaacaacttactgcagggtttgtgctgtcttccccggacatggtacagaagagtacttcagagcgatttcgaacttacttaacaactaagtgaccaagtcgaagtgaaccaagaacgataacttactcgttcaatactccctgggatattagcagtagtgtattagatatttctgcgccaacatacaaggcgaatgtgaccatgtacgagcgtgacggatacattggaaccagagcaccacgatttcccagccaacctagattgctcctactgagcagcaaattggacccgaagatgccgaacaagtatgctgagatcctcgtcgacgtactcgacggtgctaacacggagttggtgaaattcaactactccacgcaagagtctttcaaagactctcttctcgtcgacaacgattataacagtgagacgtgtggaatgagaattcttgtgtcgtacgtcagcggcggcggagatttggagctcctggacaagtcgtgtctgcaagaaatgctgtcactcaatttgaccacgccgataaaccttcagcatttttacctcgctacggacgatgcctacgacggagcgtatgatgctagtctgaaatgataacctcttggcgagttcttggcatactagatatacgttgagttttgtgtgcaggtctgttactaggtagtcctctgcatagaaataataataatacggattcagtacggaagcgccagaggcgcagggatcggacaatatatattggatattgattgtcggcgaggcagtcatcacaatcaatattgtaccaatatcagtatttgccccaatatattgccatacttacctttagtatggcgatatattgtactgtactagagacgttgagtaatgttagcatgaatcgtcacggcacttatccccaatggttagcgagtctttacccctaactgtacgtgtccgaacatgattgacggtcttcctagtgtctaaagcgaaagtgaccagacagaagcatcgacgagcaatgttggagactcggttggggtacctctcgctctttcatgacgtctgtacaagccaagttattatcaccgacgtaggtgccgcagtaacgctgcagctctgaggtctaagtgtcccccctcctgcgcaaacgaagtttttcgcacgtagtcgcagtatctgctcaaatttattacgtatacacgttggtggcattacgtggctctaaagaaaacagaagtgcagccctgcggacctcaaggctactctcatggagaaaaccatagctcgataagagagcaagtctacgtatacttaattcggttgtttagcgccatcgacccctcgacgcgaaacgtgaaaaaaactgagactcgattaagtactgacgatggattggggtctgatgacctattaaggctgtcagaagtattcaatggcaacagccacggaaaaaggagaggaaaactagcttatggtgctttttaatatcgtaagagaaggtaggggcagtttttcttcctgaacaatattgacaataaatagtggatattgatgacatcgctacaatacaatattgatgcccaacaatattacaattttacaatatcaatttttattttccgatcccactgttagacctgcgcctccggtcaaaaacacattggttgcattttcagcattgtctactaccggcattcgcttgacgaagacgtcgatctttgggtcttctgagtccaaggagtcacaaataccggggtagcacaacggcgccatgaagatggcgcactccgccttctggccgcttgaaaccccgtcatccgagaaggtgaactcggcgcacggataccagtcattgagttggtcggtggtcgtcgtgttggtaagtgcaaacactgtagcaattgaaatcgccagcccgacggcatgaaacaacttcatagcgactgaaagcgcctagcttgttcggagtcggtggattcgggaatgaaagttgggacagcagatcggggcggtatatccgggttcgtaatatgtatccttgggatgtcgtttatgaagaggttgtgaagcgtacagtacatgtattgaatatgataacagatgcgataggcgattgctcctcatgatcttggacgaagattgacaagagtgtacgtaggtatatgctgcgttgaacatgatgtactttacattcctcaagctgtcaatcttgtacagtagattgcgaattgcaatacaatactctatttccaagtgattgcacgtgttcacagtcgaaattgaaggacgaaacgccagggacgatactgtagcaaccaaaaagaaggcagaattggaataagcttaacgcattttgggtggccaaaccgaatgtctgtgacaactacggattgtttacgtgaaccggtacccctaatagcagttacatatattaacaattagaagtattgtagtaatgcacgaaactagcttacccgggcgacaagcgtcccgggggaagtcgcagttcgtaaggctagaaatcttcatcaagatagggggatatgtaagagcattaaaagctcgtcgtgtgtctaggttgttaggtcttattaaggcaagttgccactttagtagaattttcgatggcaacttttagccaatcgcccctgcttgtaatattgaccgcaaggtactgagtgaggtatgaaattgtagctcaagatttcaacaatcagagacgataccagctaactaaatccatgcaatattcagcacatttaacgcatccatctcgaattcgaggttgtgccagtttagtagagattttatcagggagtttgtattgaaataccagctgtttgctcccttgcaccttgaataattacattatcaaccaatcatggaagctatacgcgaaatactgtctattcattggtcgacgtgacactctaccattgctcactctctactattgccttagtatactttaagcaaagcatgttatagtttttatcatcctccgcaacgatccttctggaatatgccaaggaatccaacgccgtaggcggaggaccggtaaagcaagggactgctgatgcgagtaatcaacaagtatttaagttattgagatgcagcctggactgccggtcaggtaagtgttgtgatctggcttcgttcgccggcattgccgcggcaaagtgctgtaaggattgaagttgcggcagtaggagtgacaagtaatgtgggatgctgcgtagcagtagacaggtgttgaagctggagctggcagaacttgcagttgctgccaactcatattgcgtgtgtagtttgcagctcagtctgagattagcaggacagctcggagagagcaccgacagtgagaaggctaagcgaatataggagtattgtgaaaaccgcttcttttgcctatattggtcgtaaatcgattgattagcaccctgatttagctcgatcgatttgtaaatcgatcgcgtcttgcgatgcatatgtgagtgggtacgatcgatttatttgaaaccagtcgatatagacgcgtttggagcagaatgcccaccttttactgggcaatcgtgcagcctggcgatgcatatggattacaatcgatttataccctgatttatactcggactaattaggcaattgagatctaataagcggttgctacgggtgggcattttggccggttattacaatagtagttgcgtgttaaccagcgactggctatccttagtttcgtcttgctcaaggtgctggaccgttggacgccaagcagagtgtcaacggaacagggttctgagcccaagaccagcaaatggtcaagcgagagcctgcgcgtgattgacgactccgaccactgtccgatcagctcgtagctggtgaccgagtggggtagcgtgctgtccgatcagtgggagctggtgaccgagcgcgtattgccgctgtccgatcagccggcggttggtgaccaagcggagaacgagctgcggtccgatcagctcgtagctggcgaccgagtgcaacctcgactcactgtccgaccagccggtggctggtgacagagtgctgttggggaggggccaaggcacgggacgtgatcatgtcggacaaggtggagatcatcaagcacgggcggccggagggctggcacgggcagtcgtgggtctactacaagggcatgatgatgatcgtgttcgaagccagggacgtgctggactttgcgacgggcaagaagacgctcgcggacgcgaaggaccaggcggagtttgacggagttcaagcgaagatcaagtcgatcatcaaggcgtcgctgtccatggaattgggcagcaggtgatgatgaacaagaccggcaccgagatgtggaagtatctcgagaacatctacgagggcaagacgaatgcagccacgcgggccaaccaggagatcattctgttcaaccgcttgcaggcggcgaagtgcaaggcgggtgaggacgtcggccagcacgtggacaagttggtcacgaccaaggcgcagttggaggcgctgaatgcgggcgtgcgagggatgatcttcacgcagatgctggtgcagtcattgccgaagaacgagcggttcgaccgacgcaagggcatgatggagagcgggttgaagaagatggaccagattctccgcatggagagttacaagaaggaccgtttgcttggtgcagacggccaaggatcgagtggtgcaaaccaacaaggagcgcaaggggcggctcgagcggcggattggaagcagggggcttgcttcaattgccaccagactggccatcgcttcagcgagtgtccaggcttgggcatggacgcggacgtggacgccaaggacaaggacaaggacgtcaacgaggtcaaggcgggcgtggagtgagaggttccggcgcggtgcgcaggagggggcgtgctatgaatcggcgccggttgcagccgttgccgcactggagggggcgtcgcaggagcgacggtgcggacactgccctggaagcagccgaaggaaggagatacaaggtcctgggaggggacaggagttgaagtgcaacgagtggttgggagctctggagacgctgcccaacgtgcatgtgtagccgtaggagtaggatctcagtctaatatctaccaagtgcgtgtcaagtcgtgcgggtgttcgcctcttcaggtcgtggcctcactgcgtggagcggaccgacccagagcgtaacaggcaaagtagggatcgaagactggagcgacatgccgatgtacacagccttcccaggttcgtcaggccgtacccgagcgcgacaagttgctcgaggcgtagaccaagtagtccgacgatgcaagaacacgctgcacacagtgaaaacacgacgcgaagctatctcagcgatgaactagaagaaaaggcccctgctgaccctctcttgctggctcaagtcgaaagggaactagttgtagccgcgaacggaactcacagccgacgccgaggccaagattgaagatgttgaagggggagaagagattgatgcggcacagaagtctgagagcgagcccgacccatcaagtccttccttgcaagagctgtcgatgtccgtgaacgagggtgagccagccgaagagtagccaagtcatcatcaatttggcccaggtgctgatgactggacccggcaacctccttgggacagactcgacatcgtagatgcctacatgattggcagtctccaagtcgatcagtcggaacaagacgcggagggtggcggcccaactccggccgaaaatgaatccacctggcatgaactcgtcgttgttgacgctggaaacggtatggacatttgtatggtggcagagactctcacaggtaatcagcgatctgcggtcgaggctgagctggaagacgtgcaagaggccaagcgtcagcgagacctccaaggacagccacagtggatgacgctccggagtgaagcagaacgaagagctccaaaacgactcgaatattaccaagtgtacgcgaggtactgcaagcgcaagcgcgcagtgagccccacttcagcaccaagtggaacacgacggcacatctaggacgtgaaaacgccgcacaattacggtgaagccaagcgctcaccccagagagaggaatggctagcaggcatgcgccacgaagtagatgcaatgctcagcaaaggcatgttggagatgattgatgaaagtgagacgccgagccaggcgcatctgctctctacgatgtggagatttcggcctaagacggatgtggacggatttatttgcactcggagatcccgtctggttgggcgtggtgacttccaggaacttggcatcgactacgacatgacattctcaccggttgcacgaatggtgactttccgagtggtagccgcactggcggcaaagctgagtctcgttttgtaccagggtgatactgatacagcttatctaaacgacaagttgaagatcaagcagtttgtgcggggcatcctggttttccttgcccgaaaggaaaggtctaccgcgtgaaccaggctttatatggaatgcatcagtctggcgccgagtggtacgaggaagtggacaaattcgatcgatggactttcacaacacggagactaaaaagtgtttgtacgtctactacagagatggcattctcgctctcatcccgctttacgtcgacgatgttgtactcgcaacgaactccgtggacttcaaaacgtccctgtttgccgctttcgacgagaagtatggttttaaggacggcggaatagcccaccaattcctgggcgtccaagtggaacaggacgcaaaaggcgtgtggatccaccatgtcaagaagtggctgagcgatttggttatgatggagcgcacggctgtgctaccccgatggagacgaacgcgaagtttgtaccgaaagatgaacacgagggtgatgaaactctgtcatttgactatcgcgccgctattggagcgctgatgtacctcgctacgagtactcgcccggatattgctttctccgtcggctacctgagtcgctttgtgagaaacccgtcgatgaagcattgcggagcggtaaaacgcatcctgcgttacctcgtgcaaaccagaaacctgggcatccagtactctgcgagtgatgaaattgctgacaagatcgtagttagctgatactgtgatgctgactggggcaacgaccctgagacttgcaagagcatcacaggatacatgatgacaattgctggtggtgccgtagcctgggcagctcggcgacagtctattatcgcccagtcgacagcggaggccgagtatgtcgccgcttgtgaggccacgatggaaggtcgaggcattgtcaacatgctggaggaagctctacaggaagttgatgtgacaacccaattgcaattaggtgcggacaataatgctgctattgctctggccaaggctccgatctacagcagcaacaataaataagtttctacgtggggcatattatgtaccctaaagaacaccataatttaacaatcgacagtggcaatgttgcgccaagcctgtacaaagcttatcgacgtaggagagaggatggacaagcattccagagctcctcggcatcaaaactttctccttgtttcgtggattattccacaatgagcccttgcctaggcaactacatgaaaacagcgataataaccattgaatcagtgacaacgctttctctataaataaacattattaggctctattggtttaaaccaaggaacagattttaccagccctggacgagaccttgatgcaatagctaaagtatcaaaaccatcgtatgggcatcatctcgatttcacaaaaattgtggtatttaatacctgcactagtgccagtgtcaaaaccgtcatcacggctactcaccacgccgggaaggctgacaacagcagtaaattaccttcaaccatgtacgtatcgtcatgaaagggtaaacgtgcgggggatatacactgacgtttagctttgctggaccctcctgctgcaacagcagcaaccgaactgttcgtcacgtgaaattcgagatcggttattgtgcctttcgcgtatttaggcgggtgagctgttaatttaggcggaattacagttataaaagggcgatcaacgcttatttagtgctaattctgcctaatattgtgagcgcttcccctaacatccgcgatcagcatttaacccctctatccccgtattatgtatcctacagaataagcattgtcacaggacataatatccagcaaacttgtcctctctttcgaacttcgcatatggatgtttgtatagccggtattgtgcacatcttcctgttacattagcgatgggaagataaacggggtttattccgcggtaatagacggacgagtataaaccaccaacaggtttgaaaattcgggtggaagcctaaaaccgccgcgtgtcagccactcgtactttccttcattccgaaactgcgctgttcaagacgtcgcaatgcaagctttgttggggcccgtcgagcgcgcccaagtggccaagggccatggccgaagacgatcatgatgagcgccattgtgatctacaggtaagcgagagcgtgtactttgctctgtaacattgtactagtggtatattgattctacgttgcgatattgattaccagacctggtgatccgacccagacgacgctatgagctctcgcgtgtggcccgattggcagatcgattgcggagtcagcgcacaacctcatcggttcctacgaagccggctacagccgggtctaccgctatattgtagctgatgcagtggctactcaagaggctacagaagaagcgctcctcatggtgtggctacaccggagactacagaagaagcggtagatgctacgactgatgctacagaagaagctcatcgcgtgatgaggttacaccggagattacagaagaagggacagaggctacgacggaggctaccgatgaaagcggcaggaatgaagcggcagtgccggaggctacagagcaaagcggaggctgccaaaatggcgaagatgacccacggctggcgcgaacattgaagagcgtgcgcatgtaaaggaataagtagacgttggcatgaatatcatatattgtcctgtttcgtacaagaggaaccgtgtgtagtgcgtgtcattacgggctattgagcatgcaagcgccctggtgttgttagagagacaatcgtaacaagcttgttaggtgggctaaagaaatctaatgatgcgctaatgtcaagcacaaggaagaattcgcccagttcctcctcactacgtcagttaggaacagggcgattcttcctccgcgtttatcgcgacgtgccgaagatgggtggctggagccgaagtatgctgccttagcagccttgcaaggtattaccatgtagcaggttttgagcgtgctctacgctcgccacgaccaatagaagctcgccattccggcatatggtggatacattgagcatgttttgttcactttcgtagctgttctgtccacaatgtacccagcgcttgaccgcaagatgcgaaagggcttccaacagcaaatctttgacaggttttgaagtatactttaatcaagtctaattcttattctgtaggatacagaataagatctggggctagaagggttaagagccaatcgacgaagatacgagcagaatggcatggattggcgggtaggaaaccgccaatcgctctgtttccgcctaacgcaggctggattagcttattccgccttaactcggccgctcctaattcggccacgaatgggcgacccggaattaacatgggaattagctaactcggggcataattaaggtcgataagggattagagttatgccagaattatcatggcagaataagtgaaaggcacaataatttaattgcgctcaacaactcgaccagcactccattcgtaatggttaccttgtgtggcacagttgatcccagtagtagggcttaagcccctcctcctccgtctcctcctagcaataccaagagcataacacgtaaacctccagaattttacccccccctaatttaccactgccagcaccccatgtatccccaccacacaattcatatctgttacacctcgactccatccgatcaactgcttcctctggtcgccgctaagatgctacagcaaatcttccacaccgcgagacgagatcgctttgtacacagtggtgccgctgtcaccaccgtcgcaatagctgtggtttctagtcatgacgcttacccccaacgagaaaaattggaaatgaggtcgatcgatcccgctccttccaacttggaatccaagccatagtgatgtccgagttgtcgattgttagaccacaaacttcaagttgattggtagtgtggaccacccggttagtaccctattaaatttggtcctagtatcaaatggaagtccataaataattcaagtcagctggccgatcactccaaattgatttgtaccggtatctgacaactagggctccgcgaaggctgggacaggagaattttggtataaactccttctttttattttttattatatttttttcttattagctacggtcatctcctgcgcctgcttcgcagccgcagcatctgcccggaaatttgccagttcaaactgtccaccggcaatgctttactgcgaaacttggttaatatctgtttatagcttgtagaaatatccaattcctgacctttagtctttacttcatttcgttcatacgtatccaaacatataccgaaatccataccggtgttggcggtagtgcaccggttcagtctgcccacccatataaacctttagtgcggcatcggagtcgtaccggtttcaagaaaatataccagttggatgtcaacaggggtcatcgtttgacttgacgtaccacggatataatccgatttggtctgcgatagcagcactaacgttgcttcctatcccagtaaaatgtgcatgtaacgacagttctaaacgaactgcgagttattcgagagcccccctgattttcaatccaacaaataagaaagtcgccggcattcgctcactaatattgcttagcgtccatggagagctttggtttagggagttctgtctggcggttgtttcgctgtgaattgttttttttaatggagtatcattgttgtcacttagctatccggtaacgattactaattgagaacgtttgctttgtattcggaccgattaagtttaaacttcgctagtgtaaaaaaataaaaactgtagcctcaactataaacgcaaacgatcggaccaacttctggttgacatgcttgcattctcttcttctgcaggattcctacccaagtggaggggaattaaacaccccaacactcgaacgggctgtacagtttgtgagaatcgaattgttttgctttgtttttgaattgaggatcattattgtcacttagctaatatggggcgaggtgtgtgaacgccttttccgcccaggtgtgtagtgtgcgaatgttccgggagaacaaagtcccttagaacttctcaggcggatacaccagaagatgtccgcccgagatggcgtgtgttccttgtgacaatccctctcgggtcgtttgtcttcgaaccaaggagctcggccgtgttggtgagttcttgtacactgttgggtttctgagcggggtgcgatacgtacttccaaacatagcccctacgactctggacgataaccacaaatacagagttatacacaatacaaatatccgtcaattattctttcggaccctcggacggtggatcactactctagtcaactaacgagtcgtatccagagtcctggtcaacactgggcgacttcaaacgcgcacccctcccaaatgtactgagcgaaaataaccaacatcaataccctaccacacaataggcttccagccaagtcccaggcggcgctattcactccgcccgagatgtaatcgataatatgaaatacaggacctcgctctgggcgagaatacggctgcaactaggaaatgaaattggcggatcaccctgagacgcctgtacgccccagttcccttacctaacttggcgtatttacttcagggagagatcccaccacccgcggtgcccagtcatcctgcgcttcctgctcttcttggcggcttgtgggtttgaggggaaaacgaactctgtttacccttttactctgtggctatcttcctgtaacttagacatgcattctgcttttcacttgatttcactataccgcggttgacgtcgacatcccggctgagccaaaatccagtgtagagtcgtgggtacaaatcacctccttcaacgttccacggaatctttgccggtctgcctggtcggtcggaaacatcttgacttgagtataccttcatcgtatctcccagacttacacccggccagagtcgcaaaaatgagttagcgactcggccagggtcgctggtcgatatgcatcctgggcgagtcatcgccgggtcccagatccttgtacttgtcccgcaatccacaatgtccgggcgcaccatttcagccaatcagcttgtgcccagacgaaaacccaattttccatcttgtcaaatacgatcgctaacgactacgaggaggatcgaactgggcaatttataccttgtgcttccttcgctgtgagtcgggctttagagtatgaatacgtttggattcgcgtaacatgtccaggattgaagcccgaacaataacttgacgatgacgttttttttctttcaatcaagcgactacttactctaggtattgaatgctgttacaacagacttcgtagaagtatttgtcgtgtttactatctagcggtgtatgactgaattcaagtcatcgtacgcccgttagcgcgaatagcctgtttaggagacgggggtggtggatactgtggcgtcgaaagcaccgtcataagcatcttcagtgcccaggtacttgtacttgatgtcactaggcgtggtcaaattgagcggcggcatctcgtccaacacgccttatccaaccgcttaagagctcctccattggctacataggacacaagcagcttcatgccgcacggctcccaaacaatcccgtgtgttgtgtggttgaacgtgatcagctccttgttgtaggacgtcaaacagattttctgcgaatttgggcggggtaattgcgtccaatgtgctgcacaacagcagagtgctggctggactgggaattacagtgctcttgttccagtactgatcccgctggtacgttattgcattcgcctcgtagttcccgtaacccaacttattgcaccacagggacttatcctttgtgaaagcgcaatacacccgaggaaaggtgtaaaaggcaccatttggcagcttcttgctggtaaggcgggcgttcatttcatccaccgacgacccggggatttcccacatctccgagaacgcgatcaagttgtacaactggcccgaagcctacgcgtcgccctgagttgtagactgaagctcgttatgcagagcgtcatagaaattgttgagcacgtcaatgtcgtcgagcgcacagcgactcagtctgtcgacaagcggcgggatcagcgtacgccaccctcatcgtcaagtagtgagccaagagttctccgaaacttgaacgaaggcgttgctttgcgattgctggctttgttgaacaccagtgtagcgcaggtcgagttggggttcatatcgaattgcaccagaaggtcttccagtgtctcagggagacttttcgtcgcaaaatggggatgacaattgttgtcctccgcacacagatccaaaacgtggtcaccgaccccaccaaagttgatttccccatgggagaagtacgcgaaattgtccgcggaagcacgtgtcgtcgtgaaaatactatccagtacataccctgacatctctcttcgcacccagtcgtcacccgcgcctgtcctccgtgacgcaaggatcgcctgcgtgagtaggttcagtcagtcttcgctcagagagcacctaggtacactttcagcctcctacggcctcctccagggcgctacatgtctagtttgtaaagccaggatcggtctcagttcgcattttaccagctactacacaagcgggcttggcaacccagtgacctcgggaggggcaagatgcatcagccgctctgtcacagtcgtgccgtagctcacgccgtacacaatcgtgctggcgccattcgtgtgcttggcgatgaaagttttcacgtccgtggcagcgcttgtgatggaaaacgctgccagatcggcgtacggaaatgacaacgtcttagcacaggcggctacttccgtagggtcaatgctgccacccttgagagaacaagttgtttgaacctgcgcggccacacagtcgagcaacgtgctgcgtccaacgccactatagtcgattgtgtaggcgccgttccgttgagctttgtgtgcagatctaaaatcagcgcgtcttctgtcgagttcaaggtaggtgccgacaattgcgacttttgtattgcagcgttgcagggaaatattgtgaagtactacttactggtagatgatggtagacctggtccgcccgtcaaaatccacacattagctgtgttctcggcattgcacacggccggcagtcgattcacgaagatgtcgatctctgagtcttcaggggagtcacagatgccagggtagcacagtggcgctatgtagatagcacactcggccttctggccgctggaaatcccattatccgagaatgtgaactcggcacacggataccagcaattcagctggtcggtggtcaccgtggtccttcccgccgtgacttgggcaactgaaatcgccaatccgatggcattacgaagcttcatgacgcctcgttgttcgaaggcggtcgattcggaaatgagagcttggatagagatatttccgtcgttatgacgatgattactcttgttaaacatgctttacggttcctcgctcgctggagaacacaatgcacagtactgcactctgctgtaccagatagaagagatcaccacgtaatgtatgatgtcgcatcagttgtggttggattcttgttgttttcacagtaattggcagatttcggaccggaatccggaacctgtcaagcctgcaatagacccacactggcgccacataaaaaacctcgttccaatcaacgtcgacttattcattccgggcgggagtgtaaagggctaaaggcagcacggcggacaacagcgcagcagcagatcgacggaggcaagaatgcggtcggcatggagtgcgcagcggtatggcggcggtgacggcagcggacagcgacagcgtggcagacagtggcgacgcagacagctgtggatctccggaggtaggtcgtcttactctccacgcccccgtagctcagcggcagagcgggaggttatgcctccaggtcgctggttcgactccagccgggggcaatcgtgctctgtgtgttgcttgtgctttgtgcgtgcttgtaggcgagcgctaagccagatccgaagccccccattggtgcgatgcaggcgtacaagtgtccacaacagtgccactggctttgagcgctaaatattgggcgccaagcgtgcggtatgcgtcgggatgcgaggtacgcagctggcgccagcgctcgcgtaacgaagacgctttgtgtgtaggtttcttttggtcgaaggagtgcagccgcgcgttgacggtggagtccatggccaaggcaagcgtccaaatctcgtctttccagtgctggtaagccgcgacatcggatcgactgggttgcttcggtatctggaatggcacttggtaaagtattgccatgatgttgctcgcagcctttgcctctgctcgtttgttctgctctttcttacccttaacggtttcccagatgtggttagtataccagttgagcagcgatcacgcgagcgtcgacgctgttgcaggcgctggagctgagagctcgacggcagtagtgaatgaagcgctggcggaaggaggtggagcgtcgatagaaccaagaggcagtcgggcgtgcgcatcttcaagccggccggatgctcaccaattgcgtgagcatgttctccagcgtcgaggacagcagcgagtcaccgccagcagcagcgttaccgagctgtgcgtggttcgtagtttgccagtgatctcgcagatgcttaccccacttacaacatttgcgcgttgttatataggagcctaagcgttagtttacagccgtgatgccccggttcggctcgtagacatagcgagtgacaaacaaacacattagacccagcgctctctgtggcttcgaggacggactcgaggtgcatcaagaggggggcgaacgtcgcatcgaccgcgtccaacgcgatgttaaatcgatgatcgtgaaagccaaggacatggcggtacagctcgtcgcgcagtgtcatgagctgtccatactcagcttcagagagtcgctggtagaggtcataaatagacggcgttgtcgcgggtaagtctggagattggaacccttccaggactttagccacactctgatattcttttgaagttgtcccaaggtaggcaaatgctttcgtcaaagattccagcagccacgcgcctcgggttgatatccactggatcgccagcttcggcgatgcgcagcagcaccgcgacgaagagaatggctggtcatccccgaaataatacgttggctcgccgaaggcggcatcgccttcaaggtatccttaatgatctcggtaatgtaacttgctacgtttggccgctttctctctcgtttctccgggggttcggcgcctctttcgttctctttctgcagcctttcccagtacatgatggcttcttcctgaaaataaggctggcctccaggaaggtccgactcagcaaaccgtggggccaaggggaagagatgctcagagggctcatcgtagcatatgaacaacaggtcaaacgcgtgaagcatgcactgctgccagcgctcgggtgacttacaaattgacacgccctgtacaacccaggtcttaatccgggcgatatgcaggaaaagctctccagaggcggcgattgaaagttgttgcttgcgtgcgaagcatgtatcgatagcccgcccaaatgtatgccacatcattgtcaaaagcgcagcatcatgcacagacttaagaccagttgttacatcggcatgagtcacgagaaatcccactagaccacacaaatcaccaattgtacaccctggggcgtcattcgtttgaacgttggcgcgaagattgcgttcctcaatgtgacttgccatcttgtccctgatttttgcgatcctcttggagtcggttagcgacgtagtgtagcgctctcgtaggagattgacgacttgtgagaagtagccaagacctgttgccttcgccagtaatccgtcggcagcacggggtctgttactttttcgagtctgtatgaagattgaaaaaactgttagcaatgaataaaagttttgagtaggtacactagcatcatcacaatgcgcttgatgtatatcatcgagcgaagccttagtcaggctcatggagttaagaaattcctcgaaaagcttctcggcagctagctcctggctgatcgtgccagctggagtgtcaagcccgcgtgatgccctccgcatcgtggctgttgcgggagatcgagaatgagcacgagttcagctataatctatttaaaaaccatcgcaaactatcgaacctttaaattgcctgtctttctggcagagcagtgctattatcggataagttgcagtctatataaatgtttgtatactttcttattagataattccttgcgattccgagcaattccggaaataagctgggacacacttaacctaaccctaaccccaacaagattttttttggataaaagtaaggaccaaatttggggcagcccggttgacctcattttaacatgtaagaagcaatgtcaggtatggatagaaaggtctgcattcggtctacacgaggatcggatcagtatgtgctagagttgtggcgtcttcgcgcagcagctccaccaaaaaggtcattcggagcgtatcctccttaagttaaggacaaaaatagctcggtcaatagtagaaacaagtgaaaccgtcggcgacccttcgcgcccaatggacgcccaccgtcagctctctggaaccgtacttaagtgggtgcatacaaatgttaagatagttttatccttaaccggccagttaaggataaaatgttcccaaaatcgaggccgccgggtttgtttctgtccttattttaaggataaaacttgttggggctaatactctgtgattgggtataattcactgtagtccttgcgttcgcgttgcggattgagccatgcccctgcagtctctgtatgaggggtggggtgtccggccaaaatactcttaatgcaatgattgcaattatttacgtgttcgcgtagccaaaatactcttatcctacattaattcagtttggtcatccaatatgcgttatacctattctggcttctgtttgtcatcatttttgccgttacaagagtttactctaaatcccgttgatttttttttgatttgtattcctctagccctggcacagtgaactggacatcgtaacgtcgacatctccagctcggatacgacaaggatgccgtgttgacatgggtgtgacgatccattcgtccgtaaacgacgatacccatgctttcattcccacatttaccaacaactcgctcaaccggctcgtggtgcccatgcgaacccctttcatcatcgggttggcgactgcaattgcccacatcgccgcggggtccaacacggccggaagccaactaaacggctggtacccgtgcgcggagtacaccttctcggacgacggaacttccagcggtcagaatgcagagtgtgctgtctacaatgcgccgcagtgctaccctggcatctgtgactcggtcaactcgaaaatcgacgtcttcgtgaagcgtctgccggctgggggtaacaaccccaacaaggcaaccaacgtctggctggtggaaggtggaaggtggaccgggacgcgggtcgtcttcctgtaagtatgatttttaagcgtttttgtagccccccccccagctctaatctaatatttactttgcaaatgctgtagtggagtctatgatgcttgacctgtacgcgaagctcaacgcaacggtgaatgtgtacgccatggaccatcgaggctctggacggagcacgatgctcgactgtgtggccgcgcaggctcagacaacaggctcccccaagggcagagacttcgaccccacggaagtggctgcgtgtgcgaagtcgctgtcgttcaagtacaaggacctcgctgccttctcaatcaccagcgccgctactgatctgtcaatcttcatctccacgtacacgaatggcgccagcacgatcgtgtacggcacgagctacgggtcggcagtggttgaacgcctgatgcacctggcccctcttgaggtgactggatatgtgatggacggcatttcgaccacgcctggcgctccagcggacgaatctgagtacttttcacagtgggacgtgaattacggcgcagtcggagactatttcttgtccttctgcgagcaacagagcgtatgcagctcccattttgagaagaaaagtctgccagatacgcttaaagaagtcctcaccaagttcgacaaagaccccaactcgacctgtgctgcgcttgtgaccgacaaaactactacgtggggcgacgtgaagccgtctttcaaggtgcgggaggcgctggggtacattctcaacagccccaagaagcggagactgatcgctccgatcgtctacagactgaaccgctgctcgcccgacgacgtcgacagcatcggcaacttcctcgacgttctgaactccgacatgacctacaccactcaaaacgagatctacaactcgaacctgctcttcttcctcatcgtcttctcggagatgtgggagttccccggcccgtcggtcgctgaaatgaatgcccgctttggtagcacaaagctctcggacgggacgttttacaagctcgcgccggtgtattgcgcgttctcgaaggataactccaagtggtgtgaggacttgggctatggagactacgaggccaacgcgatcatgtacgaacgcgaccagtactggaacaagagcgccacgatccccagtcaagccagcgtgttgctcatgagcagcaaactggacgccaagacgccgcacaggttcgccgagtcgctgctggacgttcttgaaggagacaacaaagagctggtgacgttcaactacacggagcatggaactatgtcgtggtcgttcctcgtggatggaatctacacgggtgagacgtgcggcttggatattttcgcgtcgtacgtgagcaacggcggagacctggacaagctggacaagtcgtgtctggacgagatgccgccgctcaatctcactacgccaatcgactaccagtacatctacctgagcacggacgacgcctacgacggcaccttcaacgcgaccgtgacgactgtctacaactaagtggagcagcactcgggattgaagagcaactttcgttcaaacatattcaatgacaacacggatacgaactgtcggacggcgtctttttgtcacgtttttaaattttgagaccccccccctcctcataaccgcgaccaatctggacagtgatggctacaaactgcagtctatcgtacagaccccccccccccccctgaagagaaggagcgcatcttctttgttggatgagaccgtgcactgattagccatcaaatcggaccagcatggcgtccgtcctgcagacgtcacttgcgctccgagccgctcaagatgaagcgctccttctccttccccctcctcatcgctgcgttggcgacgctgtccgctccctcgtcggccgcgccgatgtgttctcgcacgtggaagcagcgcgagcacctgcacccgaaggcgcactctttacctaccctcactgaggcgcaggtgctcgagctcagagccctccccaagcagctggactggtgcgagcgtggcatgtgcacgccctcgtggaaccagcacatcccgcagtactgcggctcgtgcttcgcccacggggcgctgtccgcggcgcaggaccgcatcaagatgatgcaccgcgcgctgggccgcgtcggcccggacgtgcagctcgggcggcagacgttcctcaactgcgggccggcgcacggcctgtcggacggctgcgggggcggcgagccgtccgacgtcttcgagttcatgcaccactacggactgccggacgagacgtgcgtgccctacagcgccacggactaccgcaagtacacggacaccaacggcacgtgccccccggagggctattgcatgaagtacgtagccaaggcaacttcaacttggcaagccagatattaattgctgtgctctgttttgtattctgctagttgcatcacgacgcccgaccacccacagggtccgcactgcttcccggtcaagacggtggtgcggtaccgagccaaggagtacggccgcgtggcgggggagcacgctatgatgaaggagctgcttaagggccctattacgtgcggcattgcctgcagcgacgagttcaccttcaactactcggcgggcgtgttccacgacaagacgggcttcctggacatcgaccacgacgtggagatcgtcggctggggcgaggaggccgacggcaccaagttctggaacgtgcgcaactcgtgggggacctactggggcatgaagggcttcttcaagatcgtgcgcggcgtcaacaacctcggcattgagtccgactgccactgggtgaaccccgacatctcggacgaggagctcgtcttctcgcagacgacgcctctgtatggcggttctctctgggggatcgtgcccttcgccaagggagctgcgacctcgcaccccatcaactcgacggctgacgtcgtgctcagcaacctgccgttgcagtccgaggagctgccacttgagacgacgacggggttgagtgagaactcggaggagatcgaaacggtggcgcttcgcaccgcggaggagaaggaggtggaggccgcgggtgttcagaacgagggctttagcttttctctttttgcactattcgcggcgctcattgcactgggcaccgtgatcagcaacgtggtctcgaggttctcgcgcagtgaagcctacaaccgtctgatctaagttttcggtggtcagccaaaaaatgagaggctgtagaaggaagttgagagagaatgaagaatgccatgacacgcattgcagtacaccgcagtttgtgtgcgcatgttgattaccttttccctcgagatgaattctcgtcctaccttcagagaagtaccgttctccgcaagaaaaaaaaatgaatcgaaggtaaccgaagtagcacacacagcgacggaaaattaacctccacatgtgatggaaaccaagtcagattttagttcttaaaatagtaaatttattaagtcattaaagaaaaagatggcttcaggatcacaaggggtacatgtacggaccgaacctcatcttccagagtaaacgataacggcaagaaggatggcggaagaaagaaagccagaagcggtataacgcgtaatggatggacggaccggtgacaacaacaaagactacacacaccactgattaacatcatccagcacctgccgatctttcacttcaattgcattccttcccgtcgtatgccatttcttgcgacggatttttgtttcgcagaataatcacccatcgtgtctgttttcatgagccgggcctccccacaacgagaacctcaactcggatacgccctctgcagtgaggtgttcaagttctcatttccaaattatccggtcccaggtcaaaacttactgcggaattcgctgcaccatgaagattcgtcatgtcatcgggttgacaatttcaattgcccaagtgtctgtctgcaggaaccaacacgacggccaccaacctactgaatggctggtacccgtgcgccgagttcaccttctcggatgacgggacttctaccggccagaatgccgagtgtgctgtctacaccgcgccaatgtgctaccctggcatttgcgaccccctcgaatccgacaactccaagatggacatcttcgtcaagcgactgccggccgtgagcaatgccgacaacgcaacgaacgtttgggttttaactggtggcttgggccgagcatccacttcccgtgagtagtcattgtcccttaacctttgacgtcttcttcagagctaacctcatatttgtccgtcctcatttttctttcaacgctacaggggagtctctggtactggacgtgcacacgaacctcaacggaactgctaacgtgtacaccctggattatcgtggcactggacgtagcacgctgctcgactgtgtggctgcgcaagctctgacgaccggatccccaagcagtagggacgtcgaccctaccgaaatcgctgcgtatgcgaaagcgctggagatcgagtacaacgacttggcagttttctccatcacaagtaccgctactgatctggcgacgctcatttccaagtacacgaacggcgccagcacgattgtgtacggagcgagctacggatcaactttagctacacgtctcatgcatatgaaccctcccgaggtggcggggtatgtgctggacggcattgcctccgtgccaggagctccagcgggcaagtttgagtacctttcaacgtacgaaacggactttggtgaggttggcgaccatttcttgaatctctgcgcactagacagcgcatgcagtacccatttctcgaagaaaagtctgtcggacacgcttgaggacctcctcgtgcagtttgataaggatccgagctcgacatgtgctgcgctggtgagcaacaaaaccagcagctggagcagcgtgaaggcttcgttccagttgcgcgagactctcgggacaatgctcaacagtgaggtggagcgaacaatgatccctcccgtcgtgtaccggctgaatcgctgcttgtctgaagatgtcgaggtcatgagcaacttttacgactttatcaactctgtcaccggctctggtggagagagcgacgcgtacacgtcgatcctgctgtacaagcttatcatgttctccgagctatgggagttgccgggaccgtcggtggctgaaatgaatgctcgattcggcagtacgaagctctcggacggaaccatttaccagctgactccgatgtattgcgcgtactcgaaggataaagcgcagtggtgcgacgaattaggctacgagagttacgaagcgagggcggtcatgtacgagcgcgaccaatactggaacaagagcgtcgcgattcccagtcaaaccagcactcttgtgctaagcagcaaattggacggaattactccgcacaaatacgccgaatatctgttggacgcacttgaaggagacaacaaggagctgatcacgttcaactactcgacgcacgggactcttgggggcacgttgctcagcgacagcgcttcgttgagtgacacttgcggtatgaggctgcttgtgtcctatgtgactagtgggggagacttgcaaaggctggataaatcttgcgtgaacgagatgccaccgctcaatttgaccacgccgagggaggatcaatacagctgcctgggcacgaaagatgcttatgacggcgcgctcgacgcgagtttgctacagtagggaagtgaaggtgctcgagaactatcccagttatagattgaggagctttgagggccttgatacttttgaaaaatacagagtttggagttgcctcgctagataagtcaccgctctagttccaggagttctggtctgttggatcgacttctaagtgattgcccgccaaagtcgtgtagagaggtgctttttattatacatatccaacagcgccaaacgatgcacaacattaaaaaaaaaaacacacacacacacacaacaagaatcctcacgcatagatgcagacacggaaggggtacgtgatcgtttgagtaaaccataacggcacaaaagatgacgaaaagaagccagaacaagtataacgcgtactggatgtccaaccgaatccctgacaagaacgaagccagcatgcaccactgatgcaacatcacatagccctttaccctacgtatggataataggtatgcacagttactgtactacatgtagtatatagcgcaaagcatgcaacagctttctgctagatcattgaaagtaatcatccgacttttaacccccgtcacaacgaccgctgcaactcggataggcgcttcacgccgcacagagtcctgtgctacgcttttattcctgaatgtactgcctccaacaaacgacctaggcgtttttagctgccatgaagcttcgtcgcgccttcgggtgggctgtggcaatcacccaaatctctgcagtaacaaccacgaaggccaccgaccaactggatggctggtatccgtgcgctgcgttcaccgattcggatgacggatcttctaccggtctgaaggcagagtgtgccatctacaaggcgcctttgtgctaccctggcatttgcaaccccctcaagtctgaagatgcgaagatcgacatcttcgtgaagcgaattctggctacaggaatcaaagctgaagaggcaactaacgtctggttcctccaaggtggaccggaagcttgagccctccttttaattgttggtacatataaaactagttctgtgttcagaacggggactttcacgacggtgcctatatttaagaaaaacagtttgaggagttctcaaaccatctacaacatgacagtgaaaagccctcattgagccccaacatggactagtggatgaagatgcatcccgatcgtctgagtaaaccataacggcgaaaaagatggccaaaagaagccagaattgctataacgcgttttggatgaccaaaaccgaatggctgacaagaacgaagacatcatgcaacactgatgcaacatcacatagcacctgttgctccctgtacccttcgattggacaatagctatgctcagttactacagtatagcgcaaaacatgcttctgcaacatcatacaaagtaatcatccaccggactttaaacctcgtcacaacgaccgctgcagctgggatacaggtagacagtccacgccgcatggagctctatcctgtctttcattcctggatctttggcctcttgactacgcacatcctttcagccgccatgaagctcgtcaggttggcgatggcgattgcccaagtctccacagtggccaacgcaacgacgaccaaccaactggatggctggtatccgtgcgccaagtttaccgaatcggcctacgggccttcgaccggtcagatagccgagtgcgctatctacatggcgccgttgtgctaccctggtatttgtgactcctccgagtccgaagactcaacgatcgacgtcttcgtgaagcgaattccagcggtgggcgccaataccgacaaggcggccaacgactggcttctagaaggcggtccgggggtggctgtaagtactgtttatcgacctctgtaagccttcttgtctctaatcctacattcctaacatttcgtgtacagttgagcaggctatggcagatctgcacgcaaaactcaacgggacggcgaacgtgtacaccatggaataccgtggcgttggacgtagcacgcgactcgattgtgtggccgctcaggttcaaaccagcggctcccccgatggttcttatattaatgctagcgaggtggctgcttgcgcgaaagcactggagttcaagtactccgacctgtctgccttctccatcacaagtgccgctaccgatctggcgactctcatctctaagtatacgaacggcgccagctcgattgtgtacggtgcgagctacggcacggctgtggtggaacgtctgatgcacctggcccctcccgaggtgactggatacgtgatggacggcatttcaaccaccccaggagcatcggccgacaaattcgagtacttttcaacctacgagcgagactttggcgaggtgggtgaccacgttttgtcgttgtgcgccaaagaccgcgtatgcaaatcccacttcgcgaagaaaagtctgccaaacatgctcaaacgcctcatcaagcgattcgactagcatcccgattcgacctgtgcggtactggtgaacaacaaggcaaaaaagagcaatgcgacggcgtcgttcaagttgcggaagacgctgggcaaccttctcccgggaccgggggagcgaacattgattccgcccatcgtctacagactgagtcgatgctcggctgaagatgtcgaggtcatgaccaattttttcaacgttcggtatggcggtggcagccccgcccagtcagacgagtactcgtccgacctcttggcgaacctcatcatgttctcggagatgtgggaggtgcctggtccgtcgttggatgaaatgaacgcccggtttgccggcacgaagctgtcggacggatcgatttacatcctggctccggtgtattgcgccttcacgaaggataaatcggaatggtgcaaacagttgggctttggagactacgaggcgaatgcaatcttgtacgagcgcgatgagtattggaacaagtcagcaacaattcccagtcaagccagtgtgctactgttaagcagcaggatggacgccaagacgccacacaaatacgcccggacgctgctggatatactcgacggtgacaacaaggagctgatcagcttcgatgatacaaaccacgtagcgttgctgtggtcattcctcgtcgataacgattactcaagtgagacctgcggtatgaggctgcttgcgtcttatgtgagcagcggcgggaacttgcaaaagctggatagatcgtgcgtggatgagatgccaccgttcaatttgaccacgccaagcgaactgaagtacaagtacctgggcacagaagacgcttacgacggtgctttcgacgcaagcttgcgacagtagttatgcggaagaactatcagatgaaatactgtgagatttgttcctggggccaaggagaggaatcctctgatcggattttcaataacatcatagttgcaccagttggcagtggattggatgaatgcagccaaactgaattactgagtcaaacgtcttctctgatgcacgacaacaacctgctgaaactttgccgttggaaggtggcaaaatgctgtgcagcgaaggttgcgtcgctcacgtggacttcaaaacgacttgttggcgcttgccattcggtgccactatgactatcgcttgggtcaaggctgcgcagatcttttcaaactcttgcataggtttcacgctgtgtgtttgatgaatgaaaaccgcaacatgtattagcagcacggcgcttcagcatcgagccttgcagggtggctgatgcccaggaggcacagccaacaaacaaagcgcggccttgccagacagtcgtgtcatgccatccatgttgagcagagtcgagctgctggttatccgagataagcccagctagcaacgctaggcgtggttaagcgtggattcgggccacgggcggttgcgccgtgtgctggtggtgcggcgacggaggtggcgcgggggtgtcgtgctttggcaggcttcgggtgtctcttcggcttgttggtttccgcgacaaactcgcgcggcaccgccgggcgtggcatcggcggcgaagtggttggcggaggactcgtcggctcgtggtgcgagcggcgagtcgacttgggggcgccgtccaccggtacccagttgtcctctactgcgtcgccagcatccgagagaagctcgcgtccacctgccggttcgacaggcttccgttcatgctccggtttggctagcttccggtcgttgctgggcgacacgctcgttgccgggtggtggtgcaggcgcggttgcttcgcgtcaacttctgcgtcgacagcgacgaatgcctcgcggtgaattgcaggctgcggcccggtcgtcggtgggtggctcattcccgggtgccactcgtcgtgctgcggcgatcgtgccttgggcgttgccgctgccttcggcctctgctcgtgtgaatattcagacgtcgagacggatagctgcgctggtatggcagcttccgtcggctggtggctcgtcgaggggtggtggtgcagcgtgtggggtgacgcagacttggtagcggcgagcggcgacgtcggaggcatacggttgtcgccgccgcgcaagttgttccgcgctggcgcgttgggctccgtcccaacggttgggttggtcgcggaagccagacccacgagcgcggcgacgacgagcgttgtcatgagcttcatggtggtaggggggagtagttggtggtggtggtgtggggagcggttgtggtaggtgtctgcggctaggcaggagagtccttgggtcttgttggaccgagtgggtaagttgaggaatgaggcttgcctgcactgcggacggagaggattcgttccctcattcagttgcgggcgcaggtcgtagccccccgcgaaacctcaggtgcagactgcatcacgcacgatgctgatcgagcggggttgctgaaagctcccgttcgtgaaagcagtgtccatgtctgtgaaacgtccacggcggccgtacgtgccgggaagtactcggttcgccttactccgtccgcagtgcaggcaagcctcattcctcaacttacctactcggtccaacaagacccaaggactcttctgcctagccgcagacacctaccacaaccgctccccacaccaccaccaccaactactcccccctaccaccatgaagctcatgacaacgctcgtcgtcgccgcgctcgtgggtctggcttccgcgaccaacccaaccgttgggacggagcccaacgcgccagcgcggaacaacttgcgcggcggcgacaaccgtatgcctccgacgtcgccgctcgccgctaccaagtctgcgtcaccccacacgctgcaccaccacccctcgacgagccaccagccgacggaagctgccataccagcgcggctatccgtctcgacgtctgaatattcacacgagcagaggccgaaggcagcggcaacgcccaaggcacgatcgccgcagcacgacgagtggcacccggcaatgagccacccaccgacgaccgggccgcagcatgcaattcatcgcgaggcattcgacggtgttgacgcacaagacgatgtcaaacacccgaggagaactgccacgccgcccagctctcctcaccactcgcgtcagcagcaccctgcaacaagccacccgtcaagcattggccgtaagccgaccgcacacgagcatgagcgagagcctggtactgtggcgggtgggcgcgagctgctctcggagcctcgtgaagcagcagagccgaatcgtgtgccagtgaatggggcgccggcggacagcgcccccaagtcgcctcgccactcgcgacacccgcggaagacccacccacctacctctgctccgccgatgccacgaccggcggcggtggtgcgcgagtttatcgcggagaacgaccacccgcagcgacacccgaagccaagtaggaagcatgacacccccgcgccacctctttcgccgcaccaccagcactccacgcagccgcctgttgaacgcttccacgcttagcacaccaacctagcgttggttggtgccgccaagtcggaggggcgatcgtcggatacgagctagcgtcggctcgacatcgtgccgccgctttcacgtccatcgcatggcaactgcctccggtggatcggtactactggctggccggtaaggcgacgtcttcgctggttgtccgtggcccgcgtttccaaatctgcatagacccactccattttgaattgctgcgctgtcaatacacgttgctgttttcattcatgaagtccacacagtgttaaacccgagcctttaccctccctatctatctatatctatctatactcatagtttgatccgatcatatgaaagtgattttcacgaataagatttcacagtttgacacacgaacagccacagctttccagatttggaaccagacgtttagaaacgggtcggatccagcactcctgattcagtgccactatacaaagcagcaggccatggcgagcgagaggtgagcccctcccctcacccgccccactcgacaaatcgttttgctagcttcctagaagaacgacctctaaccctctccctctgagaacaatggtctccatggcatgttttgagaagtttttgtcttctgcacctccgctcgcaggaatacgagcgcgtgcgccattccaagtcgatgctgtcggagccgcgcttgtctgatgaagatgcagcgcgtctagtcgaggcgtacgagcgcagcgacacttcagcggccgactatctcgcactcgtcaccgagaaccgtccgttcacgccgccggcaacaacgcacgtcgttgtcatcgactccggaacgtactgcgcgtcggtagcgatgcctgtcgtgttcaactcgtttctccaagatcacgggaatcaagttgttcaagaactcctctcgcgctacgaagaagctctggcggagaaggccccagctggtggaatcttcgtccacgttcgctctgctgaggccgagaagagactcgtcggtcaggaagtgaacctcgtcggccgcaagttcaagatcaagcgccagtctccgtttgacagcaagttctacttggacgtcttcggagtgcggtccacggctgtcgccaatgatctctttatgggcttagcccagcttggggcaagaccgtttttcttgacgccgcgagacgtcaacatgaacgctcatgtggctacaccaacctggcgtttttactttgggcaagaagagcccccttcgtgcctaaaaagtgcgtggcttcgttaccaatcagttggtgtatgggcggaagttttacattgcccgtggaaaacgcgctgaagctccgccaacacgagcagctagcttcaagaagtcgccatactcggtgacgttgcctctcagagctgaaatacgtcgtagctcaccgccagcttcggctgagaatgctgttgagctagccccagcgagacgcagttgcgttgatacgctgccacgacgtcaactccaatctccaatactggaattgaatgagatggacccgcaccagcaggagcaagaagctcatggcaatgccatggagcctcaccatattttgctgatagaagcagcggaacaatcggatagcgttgaagaaggggtgatgactgtggacgctgaaccgcatggcgctgaacgcgctgctctgcgagcggatgactcggatgtggatatgcaatctacaccaagtgatgacgacgtggacatggcccgtcagatggaaacaggtttcaagcgtgctgaccgtactctgtcgtcctttacggacgaaaatccctgtgcagctcttgaagttgtggactgtgagtttgaagctattgagccaaatactacgtcggattggactgctggtgtattgatggtgcctcatcttacctcgatgggaaccacgcaagatgctagtgaaccccttccaacctagcgtcgcacgaacaccccagggaacaacaaactggtggctgaagaaggtgttttagtgtcagccgaagaagcggagctggaatcgcatgaggatcgtgtggtccaaaacacgcaacatttgaaacctgttgagaagctgctgcagactttaaaaaacatggacaaagtagtcgaatctattacggcgatgccaactgcatggtctacggctttctgcactgatctcgcaaatggtggtgacaatttggaggaactggcgtcgatccacctgttgaaccgcattctcgcagcaaatggaatgttgggcacgtttaacaaacgtgcgatcagctcccacttgcccctcgggaaaactcggagctcttacgtcagctacttagccgcggaactgaaacgacaaagtgctgaagcaaaaacccagtgggggattctgcgcctgcttagcgcctttgagttgctactgaaagctacgtgtccctttctgactggatccagtgaatgggtagattatctcgtcggagagcacgatgcagacacgtcgtgcggacatggttctcttttctctgattcgatacttgtccatttgctgcgctctcacctaggaacccagctactgacagcactgctgcagaaattaccaacaagcacacttctggtggacctccactcgctatgctgcagtgacttacaagtgcaagagctcccgagtgttccccttgacagtctgtcgtcggcttctgaggcggcattgattaattaagatgacttcaggactggatgttggtcaatcgtgcaagatattgacctggaatgttcatggagtaaaagagggtggctaccctctcatctcgcagcatctcaagtatttttatttttcatgtattcaagaaactcgattcaaagacagtcgtcatgctaagcgcttcagctacctggtggaacagtgttttggaggtcgggtattttttagggaccagaacggagcatcgcagcatactacgtttccgcggagtggaggcgtcgcgacaattattcatggttcctgccccggcgtcaagacagcagtagtcgtggcgtccaagacgatccccaatcgatatctattggttaagatgcgctggggggacaagatttgttacattcataatatttacacgcccaatgacccggcgtcaaggaaggcgttatttgaacgcctaccgactaattttgagactgcagaaaatggaggtgatgccattcacgtggtttgtggagattttaatttagcggtggatcctaatctagacgctataacaagcaactcaaggcctgattccagtaggactgcgctcacatcgtggatgaccgagattaatgcgattgatgcttggaggcttcatcacccagacgtgcaagtgttttcgggtccacgtcctcgtcgaaatcgtctagactacatatttgtttcggataatttgatttcagcgtgctatcaagattctgcgtatgaagactgggaaggaagtgatcacagggcccaccacatcaatcttacttcgtggtatcaccccacaggaccaggatttttggcggcttccggattggcttctgcgtgtgccacaacttcgtgaagatatccagacgaaagtgaaaagctgtcttcaagttcttggtgcatctgataatcctgggatagtgtggaaatcctggaaataacgcatgaaaagttatctcaaaatttgtcagcgcagtatgaaggctaatgcagaatcggaccttgtccgcgcccggcaactacttgaagaatgtgcaaaagcagtcgctcaggatagtgacgacgagcaagcctcaattgatttttatttcacaaagaaacggtatgaagagtgcaaggaggaatgggcggacttcgaagtggagtcggatttgaaagaacagtcacggaggcagaacgtagctcagcattttgctttcgggcgccacgctttgagctccgccataccccgtttcagtcggccaagctcgccgatggctcaatgtcaaacgatccatcagcaattaacgatggttttcagcgccattggggaaagatttttggcgattctcgcttttcgcaggatgatcgtccacctgatgaagcagctcaacgtcgcctactggactcaattgacagaaaattagcgccggaagctgaagaaggtctcgacgctgatatttcaggatacgagttggcctctgcaattcggtcaatgcgagggcactctgcgccatgaccggatggattcacggcggccttctatcaggtagacccggacgtgtttggtgaaatattagcaatagtatttcgctaccaactccaacgtggagagcttcttcctcatcaacgctattcctcggtagccctcctcttcaaaaagggagatcgtgcagatccgggcaacttccgaccgataactctgctaccggtggaagtgaaggtgttgtcgaggtcgctcaccgatagattaaaaccctatatgccctcgctagtctatcctgaccagaagggtttcatcccaggaagatccattcatcaccaagtaatgctgattcgtgacctgcaacacttggttacctctcgaggtgacaaaggcgttgccactttcctcgattttgcgaaggcatatgatcgtgttaaccgtgggtatctagttaaggtgatggagcgccaaggatttggtcccaagtttcgctcgtggataaaactactctacgatggctcacaatgttctctaatgctaaatggatgggcgcaaccagctcttgaaccttcacgtggagtaaaacaaggagaccccttgtcgcctttccttttcgcgcttgctttagagccccttggaaatcttctacgcgcagagcgagagctgggggttgaagttgacgagacaatttcggtcccagtggctttctttgctgatgacacagttcaactctcagcggatgtgcggtgtctgcaacaacaactcagcccagttgatctgtattgtgctggttcgtgtgcaatgctcaatccagaaaaaagtgtgatcatgagcctcaataaccatcgggcggcgccaataatcgagtcgctccggtcacttcgaaagggcgagactgtaacgtatcttggcattccctttgggaactttcatacgtccacatttgtggcaaatcagctcgatgaaaaattaatgactcgcctccggctgtggaaaggaagggcacgaactttgatggggcgtcgactaattgtccaagctgtggtcatctccttgttatggtatttcacgaccacgataaatatcccggtccgatttatcaggcgatggcagggtgtcgtgacccgtcatgttttatataataagattgcagcgggtccaggtggaatcaatgttgtgaagaagggcttggcaactcagccacgtgatgaagatggcattggtgtacctgtgctcgctacagtgattcgaagacaacgttttatgcttcttcagcagttcattcaggtgctgaatacgcatggaaatgatggtgcggccgtttggtacaggccaatggctgaattattgcacttacgatatggggtattttcgcgaaggtggtctggagactttttgcttcagaatcctccaaaaccaccgggatggcgagcagctatgctgctaatgtggtggcgccagttgttgaaggactggaagcgggtacattggccacttcggcacacgctgcggtatacgagagcaagaaccgttcagtatgcactattcactcctatctggtggaatacatcttcttcattccaagtgtatcgtcgagaggattcggctcgaaaacctctgggtacaggaacgattcatttcagatgtctgtgccgagagcttgcagctcagcagcgatagttagctgacttctttgacacctctcatcactggccaacggctttccatttctttcgcaagatccgcagagtggtgctaccgttgctcgggtcacaaatcgaagtaagcgacatctttcagttgtatcggcaaataacggaagtatggcgtcgtgtgctaccggatcccgatgcaggcggagtaagggcttcatctcgtggagccttccctcctacatttggagtgctagctgacaagggcaccaatttttttccgaatcttcgattgtttgactggaatatattgctacgaagcactcaagtagttggtagcctccctatgcaagaacgtggatgcccccaattacggattcattccacactagctctgtacatctcgctgcgacgctgtttgattccggtggtgcatgatgtcatgttaagactattgtttggagatctcattgtcggttcaaggttgtatttcctcaaggcactcaatcctacggttcaacagtgcgttcgagaatcgtgtgtggcgattgaaacacttgagcactgtttcttctcatgccccggcttgaacgatatgtggcaatcactgtgggcgcgatggagcaaggcgttccacgccgtgttaagctggaggctactgctttttccgcaaccacgggacatcaaagcagattggaagcagcaacataaaaccattttgctgctgtgtagagttcacacagcaattgtgttccatgctacatggcgtctacgcaacaatatccattttgaggaagcagcaacacagcaaccaagcactcaaggtttgatgagctcatttcgccgacattgtcaatacatgttccagcattctgaagagctgaaactggacggtgatgcaataaactcggtgcttcaacgacttgggtttgatacacccaaaccaattagtttaccccaacaaggttgtcgaatttggattccgcggccataattgagttgtccaagtaggtattaccataacttaccgtagctagtgaaacggcatgtccactatctagttaatcaactttttcttcttcttctcacccgccccactccatccatactgccaccacccgtatgctactaccgtttaatcaaacattatagctccgccgagtgtccgacgcctcttcgctcatagggcatctgacagacttacgggaaggtgcgcgagcgtgagtgtacgcttgtaacacaaagatcacgaatcgtttcacgattcacctcgctctccaaagctagcaactaacaactagtctacagcacggtagcccttaaggtggtcacgctgcaatgcacgctgcaatgcactcgttgcatgttctccatttaattcaatgcagtttgtctgtccgtagtgctgttagctcagtcctgtaaccaacatagtaccgattttcgccccgttcgttcgtatttcctctgtccgaacgctaggcccgggtgtgtgttatcgccctgaatgacgggcgggctacctccacctcacacgcacaccaatactatcgtggacagatatctcaggggcgccgcctctaagggctcagttcgcgctggtcccgcaagaaaccgcatcgctacaattagtacagcatgcctgacggagtaaggcgaaccgagtacttcccggcaggtacggccgccgtggacgtttcacagacatggacactgctttcacgaacgggagctttcagcaaccccgctcgatcagcaacgtgcgtgatgcagtctgcacctgaggtttcgcggggggctacgacctgcgcccgcaacggaatgagggaacgaatcctctccgtccgcagtgcaggcaagcctcattcctcaacttacctactcggtccaacaagacccaaggactcttctgcctagccgcagacacctaccacaaccgctccccacaccaccaccaccaactactcccccctaccaccatgaagctcatgacaacgctcgtcgtcgccgcgctcgtgggtctggcttccgcgaccaacccaaccgttgggacggagcccaacgcgccagcgcggaacaacttgcgcggcggcgacaaccgtatgcctccgacgtcgccgctcgccgctaccaagcctgcgtcaccccacacgctgcaccaccacccctcgacgagccaccagccgacggaagctgccataccagcgcagctatccgtctcgacgtctgaatattcacacgagcagaggccgaaggcagcggcaacgcccaaggcacgatcgccgcagcacgacgagtggcacccgggaatgagccacccaccgacgaccgggccgcagcctgcaattcaccgcgaggcattcgtcgctgtcgacgcagaagttgacgcgaagcaaccgcgcctgcaccaccacccggtaacgagcgtgtcgcccagcaacgaccggaagctagccaaaccggagcatgaacggaagcctgtagaatcggcaggtggacgcgagcttctctcggatgctagcgaagcagcaaaggtgaatgaggtgccagtgggtggcgtgcccaagtagcctcgccgctcgccccaccagccgacgagacccccgtcatccaccgcgccgcccatgccacggccggtggtggcgcgcgagttcgtcgcagaaagcaacaagccgaagagacaccccaagcctgccaagaaacacgacacccccgcgccacctccttcgccgcaccaccagcacacggcgcaaccgcccgtggcccgaatccacgcttaaccacgcctagcgttgctagctgggcttatctcggataaccagcagctcgactctgctcaacatggatggcatgacacgactgtctggcgaggccgcagctttgctggctgtcatgtctcccgcgcgtgatcctccttcacgcctgcaaaactattttgaatcactgtgctgttaatacgcgttgctgttttctttcgtcaaaagcacacacttcgtttaaaatgaacactagtagcaattttgtttacccagaccgaaccaaacagatcgagtttttttagagcagccaggtatgaacgggtatcctgaatcatgtctgttgggagcaaccaaatttattctacttccgttacttgaagtgttgattgaggaagtaaaagacagcgctatcaatatgagtaaatggtaaaatccggtctcgacttgcgccgcttcctacttgctcaaacttgcgtcgaaagcaccgtcgtaagcgtctttcgtactcaggtaagtgtactgattgtcgatcggtgtggtcaaattcaaggctggcaagttggggttcgtatcaaactgagtcagcaggtcttcaagcgtgtctgggagatttttattcgcgaaatgagagcggcatacgttgtcttgaatgcacatgctcaagaagtgatcaccgacctcgccgtagtctctttcatacgtcgaaaagaactcgaacttgtccgccgatgctcctggcgccgcggcaatgccgtgcagcaaactcgacccaacgacgccacacaagtatgccgagtatccgctgaacgcacttgaaggagacaacaaagagctcatcgcattcaactactcgtcgcacggaactgtggcgtggtcgttcctcgtcgacaacgatttcttcagtgacacttgcggcatgaagatccttgtgtcctatgtaagcaacgacggcgacttggcgcagctggacaaatcctgtctggatgagatgcccccccccgcgctgagtctcacgccgccgactgactaccagtacatctatctgagtaccgaagacgcttacgacggggtctacaactcgagtttaggctcgttttacttgtagcagtcttgtgggtagctggactgttcagccagctaaagctgccctcccagtattctggagttttaaagatgtgggtggaagcgtatcaggcacgcacacgttggtaggcttcttggttgcttcgggcgttgtggctctccacgagcgaactggcgcacaacgcgaacaggctctaagagcctacattcgtcccccaagtgttcgtcaccacggactacatcaatggagacaattgacagcatatcaatagcgatctaatgagtgtcgtcgcaaagtaatccccccatcctgtctgttttcataaactcgagcattttactacatgtacagaattgccgaaggaaccacacaaccaagtcactagataaacaaggagtttccgagttcaccttcccagagaccggagagtcgacgggtctgcgagcggagtgtgcaacgttctctgcgccgctgtgctaccctggaatttgcgactccacggattccaaaatctcggagatcgacatcttcgtgaagcgaatgtccactgtaggtggcaatgccgaaaacgcaatcaatgtgtggattctggcgggaggtcccggccgaacatcctattaccgtaagtgctgtatcttttttctttttcctaggactatattctcactaactccttgggcctgatctggatgttgcatctttttaggagagccgatagtggtggacctgcacacgaagctcaatgagatggtgaacgtctacaccgtggaccaccgcggtactggacgcagcacgatgctcgactgtgtggcggctcaaactctgatggctggttctccaaaaggcagggatatcgaccccaccgaagtggctgcgtgtgcgaaagctctggagttcaagtacaccgacttggcagctttctccatcaccagcgccgctactgacgtggcaactttcatctcgaaacacacgaatggagccagcacgattgtgtacggagtgagctacggcacggcgtagtggagcgcttgatgcacctggacccacctgaggtgacggggtatgttatggacggtatcgccgcagcgtcaggagcatcagcggacaagctcgagtatttttcgaagtatgaaaaagactacgacgacgttggtggtcatttcatggagctatgtacccaggacagcgtatgccgctcccattttgcgaagaaaaatctgccagacacgcttgaagacgtgctcactcagtttgatacgcaccccaactcgacttgcgctacactggtgggcaacaacggcagtagctggctcgacgcgaaggcatcgttcaagctgcgagcgactctcggattaatgcttggttctcaagagccccggacactgatcccaccgattgtttacatactgaatcactgctcctccgatgacatcgacgtcctgaacaacttttttgatgttatgagcggcggatctgcagccacgactcaagccgaggcatataattcgaatctgctgtactacctcatcatgttctcggagatgtgggaacttcctgcgccatcggttgctgagatgaccgctcgatttgccagtaccaagctttcggtcggcacgatttaccagctccccccctctgtattgcgcatcctcgaaagataaagcacaatggtgcgatgagttgggactcaaagattacgaagccaatgcgatattgtacgagcgcgaccagcattggaacaagagcaccacgatccccagtcaagctagcgtgctactactgagcggtacactggacccgaagacagcacacaagtatgccgaatatctgctggatgtactggagggagacaacaaagagctggtcacgttcgactacccaacccacgggactgtctcgaccacgtttctctccgacagcgatgactcgaccgatacttgcggtatgagcatctttgcatcgtacgtgagcagtggcggagacctccagcgactgggtaaggcgtgtctggacgagatgtcagccttgaatctgaccccaccaatcgactatcagtgcacttacctgagtacgaaagacgcttacgacggtgctttcgacgcaggtttgagccagtaggattcggcgacaagagtcctttacccttgacgtaccgtggcagtgctgccttttaattccggggcgcatgtcatcattttccgcactgatctacgtccagaggcacgatggtccatgaggtacaaaaagactagaacaacacgatagcgtttgcattcgcctctctaaactgagtttatatccaggagaataaggatcatctagcaaaaatagcggtctaagaagtggggcttttcgtctctaagttgagatggggcttcgacaacttagacagcctcctcctgccagattctaatccgcaaagcatggcagactgtctcgagtgcatcctctcggggctcgactgcgactgcgagtgcgaatactgcgacttcgaggtctgcaacgactggttcgacaccctcgcggactgcgacgctggagactgcgtcgactgctgcacgtgcagcggctcgtgctacgacctgatggccaagcccgagagcgcccccgccgaagggtacgcgtccattacttcaggagggacaaccgcatcaggacccgttccagtcgtaccagtcgtcgtcaacttcacgctgccatcgagtcaagcaccgcctcaaggagcgggcatataagcaagctggtcgtgagatgcagtcggcaaaatacccagcaaaataagtagacaacgtttttgagcaagtcaaccctgcatcaaccgcttctatagctcactcgaaagtcgtgtcttccctcggaagatccccaccgcacgtgtagccatgtccacgttgaagtgcagcggcagagtctctgttcatatccatccgacaacgacagcaaaagttcagctcttgccagccgatccggcgctataacatacaaccatacgtgagcacaacacaaattctttcgtcgcacggaaccaacggcatgggcggcttctgggaggcggtttgcaccgggtgctgcgctggctgctgcatcgcgtgcgctgaggcgacctgcgtcccgctctgcgacggcttcgcgaggtgttgctgcggcgaccgcgggttctcgtgctgctcaaggcccgagcctgcttaccggcgggagagttcagcctcgtacggacgcgccgactcgccactcggtgagatcgtcacggtgccagtgaagatgcagccgctgactcctcagcaggaaaccagcttcgagcctcagcgcgtgtagaagcctggccgtgtggcgacggagtgtcaaactctgtgcttgtaaggtgtcaaggccctaatgtgtttgtccagctcaggtgttcatggcaggcttaatctaaaccagtgtgcggcacgcagtattccaccaggacgacgccttgctgccgctccaaggtcaggttaagagccatcctctacgcagctgggctgtccagcagtccatactcgctgatcgagttggagatttcctgcagtcatccaacacaagagagagagaaaaaatctcgcgtcaacatcgaacgcataaagcacttcatcttactaaaacaaaactcaccagcagcgttggccaccgcccagtctcaagctcggagaagatcaagtcatgcggacccaacagccatcgcaataaatacagtcagcacaagcaaggtccgacacaactctgccttcagcctcccagcgcaccgttaaagaagatctcgaaggcccccgacgccgtcaaactgctggcgatcgagcccatgaacaggacgatgaagacggccgcgatgcggttgttcagcgcccagcgcagcgccgtcgtattcatccccagcgccggcaaaatctacgcacgacacaccctcgtcagccccaaacaccctctaaaacctctaaaacttgggcttaaaaagctcacgtattccccgaagaccagcaggaccatggccgtcgcctgcgcgtagcccatgaactgcgccagcatctgcaaagcaacacaatgcatgaatctcttagctcccttgccaacgttccacgatgtaataagaatgccgctgaccatcttgaaagggtccacatcatagttggcgccgtccactctgtccaccaggtgcgggaaagtgtcctccaggtacgtcttgatctgctggaagttctgctggtagccgcacgacgtgcagtacatgacgcgcacgtggtcgtccgcgaggtctcgctgcaggtggcgcgccgcctcctgcgccttcgccgccgcctcgaacacggacgcggcggggtcgccttgcgacgccgagagcgcgctcagactcagactcagactcagactcagactcagcgtcagcgccagcagcagcacgagaccaggacgaggcgatggcatccttccagcagcacccaagttgcagtatacttaacggccgttacgccaagatccacagttttggccaatgggagggatggtaccatgtaccgcgagtacggaatcagagagctcactgtgtcaattgatgatcatgtgcgactgcgagtgcggggacgagggcgtgtcccccacgcggcgcgagagcgcgtacgacatgctgcgcgtggaggcggccgtggagctggtgctgcagcaggcgcagccgctggaggccgcgcgcgtggcggcgcacgaggccgacggcttcgtgctggtcgagcccgtgcacagcgtcgtgcgtaccgtagcgcaattgatctattatatctcttcaacatcaagatactctgttaataacatttattattgttaatgctattgttattgtgttgcaggagccactgccgccgttccgcgcgagtatcatggacgggtacgcggtcgtcgcagcggacggagtggggacggtagggcgttgcattgtgggggggggggggattcttcctgtgtggctgtctgatcagtgttattgttggtggtagtttccggtggtagagcgcatcgcggcgggggacatgcccgtgactgcgttgaagcctggccaagtgtcgtacatcacgacggggtcccccgttccggacggagccgacgcagtggtgaagatcgaggacacgagcagcgttgaaggcagtgagacggtggcgcgggaggtggaagtgaagatcctcaaggctgtgaaggaaggccagaacatccgagctattggatcggacatcagccccggagaagtgctcgtaaacgcccatgaactggtgtcggcggcggagatcggcctgctggcgacggtgagtgatctatgcgctctggggttcgtgtatggagattttatgacgattgtgttgttgttgctatttcgtaggcggggatcacggaggtggtcgcccaccggaagcctgtaataggtgttctgtcgacgggcagcgagctggtggaggcgttccaggggacgacgacacccggcaagatccgcgatagcaaccgccctatgcttctggcgctgcttagcgggtggggtgccaagatgctcgacttgggcgtctgcggcgacagcaaagaggcgctgaaggagacaatcatggaagctcttaaacaggtggatgtgctgatcacaagcgggggcgtgagcatgggcgaccacgaccttatcaagcccctgctggaggaaatgggcactgtgcacttcgggagactactgatgaagcctgggaagccaacaacgtttgctacgctcgacgttcaaggcgctaaaaagctggtgtttgcgctgccgggcaaccctgtgagctccttcacgacgtgccatttgctggttctgccggccttgcgccgccttcgcgggcttccgatctcaaagtgccgtcatgccaaggtgtatgcgacgctgacccatccgattaagttggattccgagcgcccagaatttcatcgcgccaacctcgagtgggatgccaagcagcacaagtttctggcgacaagcactggtcggcaaatcagttcgcgtctgttgaggtacgtttgcttttcttactgctaacatgataagggtctgtaactaactgatcgtactgtaaaaattgttgctagctgtcggaacgctaatgctctgctttgcttgccgacggggactgagattcgcaatggggatgctgtcccagctctcgtattggacaatacgtttggaaatgccacaggcgtggcttcaactgtaccaaaccaaagcacggctactactgcatctgcgcctagccaccaccacgtaacagaccaatccagcgctcccaggaagatctttcgtgcgggacttttaacggtacgtagtctcgactggtgggagtccttacatgttggatactaatgcacaggctcgtaccccgcagattagcgatcgggtgtctgctggcacgtcaacggatatgagtgggccggccatggctgacgttctgcaccaagttgacaaggtccaggtggacgtcgtggccaccaaagttgtgccggatgacgtgagtgaaattcaggcagtggtgaagggctgggctgactcagacgctgtggacctgatcctgacgtctggcggcacgggcttcagccctcgcgatgtgactccagaggctatcaaggccgtgctggataaggagatcccggggtttccgattgcgatgctcgagagctcgctcaagattacggccaaggcggtgctgtcccgccctgtggccggcattcgcaagaagaccctgattgtgacgctgccaggcaagcccaaggcagtcgtggaaaacttctcagcaattgcggaggttctgccgcatgctctgcaccttgtgcgagacgtgccccatgagcaccatcgcgccaacccgagctcacaatacacttgactgcaagtttgatggcgctaactcggccattgttcgtacgcaacgcagtcaacagcaagttagggtaaaattcttttacttcaaagtgcttacacatttatcaagattctttttggtcaaaataccgactacgctcttgcggtagtccaagcgaggcagtgcttcgtccagctcactgctaatagtcgttcccggtggaatgaggtatacagtgtacggacactggggagaaatagtcaatcgagcgcgtgcggctcgtgcccccacaactcggaataggggactaattgttgcacaaacttccggtgttcagatggatcggatgacggcaacatcaaggagaagcatgtcaaagctgattcatggagactgagcaactcggtctccactctttccatcgggacagtcccttgctgggtcgccacgataccttggctgggaaatccatcaggtttcatgccgatgcgggggcgacaccaaacagcttctactcgaagtttgtggtatctactggcgtcgtctgcgtcttgaagttcaacacgacaagaccagtcaatgcgcccgctggccgtaattgtcttgtaggaaaactcaagcgactgcaaacagtcgaccaagctgtaaaagaattgaactgctcgaagctcagccgaccgccgagctttcgcctttgtttcactcgttgctcgacacaagacatatccgttctcttgcacagcgcagcgtatacgtgatgggtgcgtcgagtcttccacggttgttttgatctatgtgaagaaaatataagcagacacccgtggtgaggaacacagcaccattcaccagggataaaacgccacctacactggcgacgcgtgagcgcttcagggctcggaaacattctacgggcggaacaccttggagcgacttgtcgtgcagaatttcaagaagctgtgtccacaccaaccgggttttatcaagttccatcaggattccgtcaattgctgcgttgcaggcagcaaacttgcccacttttgatgccttgaagtgaaggacatcgttcacatcaacacggaaggtaatggtgcccttgagtctcgttctgttgatgcttgccctgatatttgggaatatcgttgcttgcactgcgcaatttgtcgcgcctctgagtttattcacaccagtgcggaactcatccgtaaaagttagtaagcttctgatcaccgcgcggaacttggcctcatcatcgtcagcatcagtgggctcgacgtagcggctctccttttctcttttgaagagcgcgtcttcttccgatacggcgacttcatccgattcttcatctgtagcattgcagccattgtcctcgtctccgtcgtcgctgcacgggtcagcgttgctatcgttcacttgagccgaagggtgaagttgatccacctccgaagattcaagacactgtactgccgtagtttctttctggtggataggttgagtgttgtgacttagtgactccgtcgatgtcttcatcgtaggctcgttggcttctgataacactcgcgtcttcggtgctatggctgcatacgacagccgggggcgaagagcatcgcgtccactttcacagctttccccgggcttttgcggggataaaggcctttttcgtaaagttgcctctgattttagctccgcatttcttgaatcaaccttttcaatgcggtcgcaaacgtcatcactatcaccataactgacgacttcggtgtactcgacttgctcagcgtttatgatcttgtcgacgcgatcgactttgagactcatttgatactcttcgacaagttccagtagaatcagcgtgagagcgtcaaccacctcagctttcgtgcttgatagagatgagccacgtctgcaaattagagggaactcttggatgtaagcgactacatcgtacattgtgttgccaggttctccactcggtacctcgcggaactgtgaagaaccaccaacatcaataccacgttagccttgtgatcaatagcaagtaagcaatgggaagcgagcacactttaccagcacgatcttcttctcgactagatacatcaacgccgcgtccttgactgcttggccgtcgttgtccatacaaaagccgaagtgagtttccaggtacgacagcatctcaccgtacagtcttctgtgttcgatcacggctcttgtcagccgcaagagcgcgccgatggctgcatctcgacctgttgcagcagtgaatttaaacgatagatatccgagtctaacgcgagcagcgaacaaggactgcccaacccttcgtatctcgcgccggaccttgagtcccgccgccacgataaactcgttgttcctcgctaacgacagcgcgttttgcacgtgaattgttagctgctccagtgatgccacgatgtcggtggcagggctgaccaaagcgaggaggtatgatcgaccgtcagccacaccgtagcttggaaccaaggcagcagttgtcagttcattttgcggcttctcttggggtagatcgatctggcgggtatctcctctggagtcactcaactgcgtctctggtacagcatcgtcagctaccggtacctctattcgatccgtcgatggcgaactgggcatcgtcgagcaacgcggaatccagaggattctccattgacattgaatgcatgaatcattatcgcacatttcgtgtgcagatgacttttgagtcgaatccagcaccgtgctttccgcagataactccaacccactcgtgatctcgtcataccattcgcgatattcagcagcgaagtggaacttccgatcctcaatcacaaactttctcgtctcgtagctcgtgaccttcacgtatgttaccaactctttcgcacattgcaactcctcgtcagcaagttgcttctgttgtgctagcagctcgtaccgagccaacaactgcgcacaactcgcgtccacttcgtctagagtgcgcaaagtacttccaggtggtcttgggtcgtcccgcacgcattcccccattcgcacaaggtgaaacacgacggtcttctcggtacttgtgcccttctcatgcttgataactacctcggctcctattgctgccacgtcctgctccaccagttccaagctgcgaggacacacgaggaaatcctcgactcccatgcctactaaatagtcgtccgcttgaatggacgaacggggtctttctcagtgaattcccccgtgaactccggcgggaaccgagacggctcgcctgttgtctctgctacttgaaacacgtgcgagttcgcaattgcggcaatgtccaggccaaagtcttggaacgtcaactcctcttcaacggcatcgcgaggcagcgagtagcgggccgtgtacacgcatcccagtgacagcagcttccgcgcgacgagcgcgacctccacttgccacagacgcgcgtccaggtttgtgataagcagcgaagatactctcggcgggatttgtgggggcgaggtccaaagagtctttggcaaagacacaagaagatcgctacgaaacccatgacccctggtcactcaggagatgtcgatagcaacgctagacaagcgcaacgtgagactatcctaataatgtgatggaaaaactgcagggtcggactgatattttttttcgtgctgaaggaatgagttctagccatagctatgagtatcatacataagaatgacggagatacgctttgagtcatagcgtatctccgtcattcttcgcttccattcgtggtagccgtactccatttcctggcacattcacgcggcacttggtacacgaacgatggcgtcgagttgcgcatgtccaattgggcgagttgctgtaagcggaaggcagcttcttggggaatctcctggcgggtaagtagcgctgagaacctgctcgaggtttctgggtcatagtctggaggggtgttcgtgtgcgtggtgcccatgacacctccggcttcggctccaaccgaggacggcggactcacgtacgtgtccgcggcggaatcccagctcagcacgtgcggccactgctgctttctgactctgttcgcgttcttggccgcaaccgatcggtccctcgccgctagcaggtcgaacgtcgcaaactcctcgtaggcagagcgtagttgggtccgagtcgatcgtctgttctgcttcgtcttcttcttcagtcgctgcctcatgcgctcttcgaatacgtttccagtcgacttggaactcggtggaggagatttctggcgtcgaaagcattgcgggattaaacatgcgactaagctgccgttgcccaccggcatgaccacggtctggtttggacttgagcttggcgtggtcggatatcaaatggcccgacacgaattaagcagctcgcaaaccgatttctgctttagagccaagtcggtgctcgacgatgtgtaaatggccagtggagctcgccacaatgtgctcggaagctgaacttcagaccacctaagacgtggcgacaagcgtcgatgccaatcatcgcgctgcctgacgttgtagcccaagtggcaggcagacttcactccatgcgtgggttctgcgcgtacaggtgttggttaagctaggtacccgcctaccgattccgtagtcgctgcacgggcgtcacagcggcaccgccaaccgacgactggagcttctccttgatactgatgagctctatgcggaacaccagggcagcattcggtgggatacgtgggggtcggcctttcacgccgtaggccagcgcaggggcaatgacaactcgcgctgtctcgcccacgctcatgtgctgcaacgccaagtcgaaacctgcgatcgtatgcccagcgcccacgcaaaactcgagtgcactaccacaccgcgctctagtcgactcgaagacttctccagtgcgctcaaagctcgcgacgtagtgcacgcgcgcgaattgccccgggatcgggaagttgcggccgtccccttcgaactcgacgtcgatcatcaagccttcaatctgcgcgtggcgcgcgcgctcaagcgcagcgagttctgcctggtgctttgcgtacatctctcggtctttcgccagctgacgctgtcgctcttcttcttggcgtcgacgacgctcccgcttgagtgccaacctcttctgctcggcgatgaggtcggagttgagccactcgaagatcttctcacgcgaagcctgcacgacctcgtccagtccgttgagcagcccctgggcgataccgaggttcagcagcgccgcgaacgccgactttggtccgtcgtccttggtcatggtcgccacgatctgcagaaactcgttgaagccgattgagccgctaccgtccgcgtccacctcgcgcatcatggcgggaaggtcgaactcgtccgcgcgacgccccagcttcttcaccagctgctgcaactcgctctcgtcgatagcgccgctgccgtcaatgtccaggatcatgaactgctgcttgagcttggtcagttccttgggtccgaacatcaacgccagcgtcagagatgcagagtactggttcttgtcctgctgcttgcgtagcagatgcaggaactcgtcgaagtccacctcgccgttgccgtccgtgtcgatagccttgatgagttcacgcacgttgttcaacgtaagctgctcgccgaggttcgtgaagagcttgtgcagctcattggcgttgatggacccgctggaatccgtgtcgtagtgcgcgaactgctcccgcgccagctccagatcctgcgccgagtagcccagatacttctcttcttgggcgttttcttctccttcttcagcctcctcctcttcttcctcgtcggtctcgtgattctcctccttgtccagatcaaccacctgcagggaattcgtcggctcagcctcggacgtcgcctcctccttcccgtcgtacaccgccgtcaactcgatgtcgtcgtcgccacgcagcacccggggcttctcccacgtcgtctcgcccgtgcgcttgtccaggtagtagtagagccccgagtcggcgtcgtagaacttctcgaacacggacgccagcatctgccgcagccgcagtcgcgccttccgacagcgaaacatgcgctgcagacacgccgccgcctgctgctcgcgcgcctcctgcacctcgtccacgttgccttccatacgctcgaccggggtcgaagcttcgtcccccatggcagatatctcgcaagtcgttacgccttgtcgagtcgagtcgctaccttggcttaatccggacaacgccactcacacagcacaagttagtggccatctcactgcactagcatctcagtcagagtgagtcaggaagcatggaatcggtcgtgtattcctcgcctcactgggtgtttacagctcgtccggggtgcgccgctcgcagctctgctctgctctgctctcccaactctatagcggacgccacccttcccttcttcagccgaacagctcgtgaaaagcacatgcagtcttcagttgtctttgcgctcgttcctcccgcagcgccacggtgcgtgacgcctcgtttttcctaactaagcgcacgtcagcgtcacgcaataattacttctacatgaacgcgtcctcgtcaaagtcgtcgtcgtcgtcgaactcgtagtccatctccatgaagtccaccttccatcgcaggatgccgccgatgccgccgaagccctggcagaactgcgagccctcctgcgagcgcgccgtcacgaactcgagcgtcgtgccgaactgcttgtagttgttggcgaaccactcgacgagcggcgtgcgctccacggtctcgagcttggcgcccgtctcggcgtccacgaaattcgaatccaccgtctcctcgctcggcgacaggatcttggccgtctcggcgccggtcgactcgttgcgcagcacgtagcggtggtgcggcaggtcctcccacaggatgagcgtctcgacggcgcccaggtccagcgccttcatggtgtcgcccacgccgaagcagtacttgcccgagtcctgggcgatctcctccatgtagctcacaatgagcttcttctcctgcacgaacttgacgttggcgagcgtctcggcggccagctcgatggcctggttgaagccgttctcgccaccgtacgacacgtccacgaccttgaccacgatggcggccagacgcttgtcgaacaggtcgctgccgttgagctcgttcttgaagtcggcggaaccggccagcacgaggttcgagatgttgggctggtcgttcgtgatgaacatctgcgtggcggtctccgccaccttgcgcacgtagttgtggcgcttctcgagacgcaggcgcgcgaaacgcagcgccgactgaccaccgcggccgtgcttcttggggaggtccacgctgaacttgtgcaggatctcgcggttgctgccggacacggcgccgtagagcgcgccgttaccgtccatgacgatgaagccgaagcggtcgttgtcctgcagcagctcgcccagcgcctccgtgtggaacttgttgtcgcacatgtagagcgacgtgttgatggggcggaagggctcgaagtcgatgttcacgcgcttctccttgccctcgtccgtgatgatggtgccgcagtagatgatgagcccattgggagggcacttgctgtagagcttgaggcgctgctgcgtggacgtgatggcgcccagcaccgacaggcggttcacgcgcgacttgatgttggaggccgtacccatttcgtccgccagcatcttggagatgagcgggatctgctgcttcggagggatgatcagcgagatcatgctcgtgccgttgctacgggttagagatggttagaggtggttagagaagttttgtttagagacggttagagacgcttagagagacgcacccgcgagcggcctggagagacttgataagcttcttcaccttgaagagctccacctggtcgtcggcttcgttgggggcggacattgtcgtggagcttgacttggtgaaggagggggtgaagagagagagggagcgcggctcgcttgttgcttcttgggcgcttctcggttctgagcgagagggggcgaaacgtacgtcgcgctgtccattcacaagtatttacggaaaagtgtggtgtaacgggattttggccaatagtaattgggataagggaccaatgagaaggcgaggaaggatattatttacggggatagccagaagggtacgtggcagatggactaagaaatgaactttgcctcttgcaacagcaacatgcctcttaggaccccgctgaatttgatagccacgcgaactggaagctgtagtcgtagcctgcagacgaacgaaagttagataaaaatcattcagcaacgatcgagaggactacccaagtgccgcagggagctctgcacattgtagaacagccagaagacgagacacatctgcacgtagtcgacttgctttctcagcacgaaggcgatttggtggatcggcgacagtccaagcatgcgtctgagcatgaagaccaggagtagcagcgacacgaattggaacaagcagtaaaacatcacgttcgtgagagtctggatgagttggttctgctcaatgtcatcgtagatcgcatagtactccttgttggggaggtggtaggtggcaaccaagtagattgcttcaatgtggggtcaaaacagcaccaacatgcacaccagggtcgccactacctcgacaggctttcaacccctgtacgttcagaagacgagtggaattacaacttcgacgtagttgaggagcagtagaaactccgccatgtatagcagccgccgcaccttgcgagtgtacttcagcctctcctgaacacttagggtgcgacttccagtgtacgtagttgcagcttcctctcgaacttccttgacaatgcctctcctaccggcaaccgggtagatgcgaccacttagtccagccgcttttagacgctcgataaatgtttctgctgcgctctttgcgaccagtgttggcccctctcgctcctgatccgatggtacctgcgtgagctgaagcagtcgggacgaacgcgatccgtctgctccttgttgctgcgcttccctctcgagaaaaatgctcgcccgttcaagtgtcgttgggatgcggcctcccaggctaatgtgaccaacctcgccgtgataactagcccacatgtacccgttatcgacttttcgctcaagccctcccaaacctttacgcgcgcgctcgatatcacgcagcgataaccccattaagctaatgtcaacaaccatgagctccatggtcgcccagaatgagggcgagctgtgcatgcaatacgccacaaagagcgagccgaagacgtcagcgttgaaaatcacaagcactggcgtctcatctccgaggtgccccacggcccgagcgaacagattcctcatgagaagcttgatcaccggtagcaacagcgtaaacggcacttaagcatcgtgcgctagggaggtaaaagcgtagaaatacggcgggtagatgaaggccagcaagaagtcgcacagcccttcggcttttgcaggaggtctcgtgcccattgaattcccatcgggatggccgtcagcgtcaaccagacaggcacaagcagcagtgtagtgaacggtagcgggaagccaacccacaaaacggttccatacaaagcgccaaccgtgagtgccgccaccacaagagtgtctacgatgagtcgcttcgtagggtacgacaacaccgtgcgcacccctgtgcggaactggtggatggcgaggaatgtcatcaccgcaaaacagtaaaactcccgcgccaggaacaattcgtcggcctcgatccccttcgatgggtcggaaagcggcaagaagtcgataagcagcgtgactaccaggcacggtactggagccccgacgacaaccgcaagcatttgcacccaactggcatcgcgaatatacttggccaggtcgatcactctcccggtcgaatacgacccacgaagctccacctgcgtggcctcccacgagcgcttgcgagccattgtcttgcaagtttttcaattgacggagacgttcgaaagagttcttgttcgaaagaggtcactcaacagtagtaatataggatcgtttcaagagactaacactaaattgttggtacatgtatcggcagaccacgcctagatcatgtctccgtcttcgtcgctgtcttcaaggtcaaccatcaatgagtcagcctcttccgtgagctgattgagccctgtgagctcctccaaatacgccgtcgcattgcacgcactcgtcaatagacccagcgcacccgcgtcatatgcagcgaggacctttgagctgcacgcaatgcacttatcgaacgcctcgccggtgatgaccatgttttgaaatgcattcaggaaccctcgaaattggtgagggatgtaacccatcggaacggagccgtcgctaggcttctcagcatccgcatacttcccttgaggggaatgtagcaccgcaaccagaagctccacagccgtcgctgcagcaatcggagcgagaccggggcgggtgaccgtgcacatttggtctagcgtacggtctttcagcgagtcacgagggctcacgatgtcgttgcaaaagtagcaacccagtgatggcttcgttgcgtcacctccatgcccgtggtcaggatgaacgccgtggcgcatgaccaagtagctgtcgaagcccaatgccgcatttagaagcagtttcttcttcgacgatgcgatcacagtcggcagccagcgactctcgcgcgaatccgtgcccataaagataacgtcatgggactcgatcagttgctccagcgtctcgaggcccttctttgcctcctccgctaactgcgggctgctcagggcgtgaccagccatggggatcgttagattcacagcttgcgagttcaccaacggaaaaatacgcttcaaagcgttcgctgcacactcgcccttcggcttcccgacgtcgttgaattcaaacaggggctggcgaacggggtttgagtgactcaccgtagagttgtccacgaatgtgatgttgcggaaaccccacgagaggaggctccgtgcagtgtaacaacccagcgtacctgctccgagtagcaggcactttgtctgcgcgagcagctccaagtctagcgacggcagctggcgccacctcatcagcttcagattcaaatccaccgacgtttctgcaaggcgaatcgggtccagaatgccgccgagctccatcatccgaggtcccattttaccgcgaacgttggcttcccagcccacaacgcgcacatcttgcctacaacggccattggtcatgaacgacgcatcactcttgacttcgaacaccacggagctcttccacttgaagtcgtccggcacctcagtaaactggtggacgtgctcacggaaggaaatgatcttgagcggacgtgaaaggtccactttttcagatgggagcgccgtcagcagcgctaagaagttccgcagcggccatcctgggtttgtcttcaacggacatgggtctacaaacccaaagagcgtctccaccacaccatcagcgttgtggtccgctgctttccacttctgcacatccagaactctcacgacctgctcacagctggcactttcagccagacgctccaccacgaagaacgaagggaagttgccttctaccacaccagtctcacgattcacacatcgcagcttcagcaggccgcgaagtgcctgcacctgttccttggtagacagcaccgacgatgcggcagctggaggggcccggtactggaacggtgccggtggggacaacgccgggaagccgaaccagtacaggaacgagtgcttcttcaagtcggcgaaggtgagcagcacgaagctgttcaggtggtcgacagagacgtccccaccctcgttgcctagaaccagatccaggatcttctcccccgcgtctttcagcagcttggccttgtccagcgtcttgaaagcctgtcgtcaataagaccagtatattagtttagacagacctatgtagtatcacaatgcatgcacacacctctagcgtgttcgtgttgaagagcaatccgggcgctccccactcgtaccgcgcgcggtcgtccgtctgagccccgtcagtgcttgggaacgcgctctcatcgatggtgaagcgcgcggggacattctccgaccgcccgggcgcgaagtagccccttatctcctgcaacaatatcaagagaaggtttggccaaagattcctctcgagctgctgctcaggggcttgcagggctgcaacacacgcacctgcgcctggtcgtcgagctggaacttgtccagcttgaggcccgtgagcgtctgccagaaggacacgtcgggcgcgctgttccacggctggaacttgagcacttgccagtcgctcatggtctcttcggtttgaagaattcttcaatgggatgggtacatctgctatcggaattgttcggtttgggtgtatccaaatattcaagtttcaatgtagccatatgaggcgatgaaaaaaagggaaatgagtttcgggtccgttattttaaaataactccaaatcgggtccgatagtttcaaatcgaacgtccatttctttttttaaagctagttacctgcccaaagtgtaccctgtaataaatccacactctgtacactgtagaccggtttgtatcttacagtgcatattttcttcatgtactttaagaaatatatatacaatcctacaacatttgtcgtttaggcacaagacaaaggttccattgcaaacaaactcgtgatatgtattttataattattggtttattccaaagactctaaccaaaagtctaattttgattataaacgccagaactagtttggcttttaccatttgcgctatactacaagtaaaatagattaatacgcgttgtatttcgtgtaagcaaccattggactggacttgtaatcaatatatatttatatatactaataacaactagtgtacaagaatattttatcttaaaaatatagttgtagtgagtgctgatatttaaactttttcctatgctttgccgtatacattttcctaaccggtttgttaagtgcttcatatataattttaaatgcttaaaagcattgtattacatacagtggatatatttcttatatcttatggtatcactttggaacagggaaaagtttgataacaggaaagaattctggaacaggatacagggtacactttgggtacgcttttccaaaactttttaattatttcataaaaacgttcgatttgaaaatagcggaccaattcggaattattttaagacaacggacccgaaacacaatcccccccccaaaaaaaaagaaggtagcaatgcatcagtcattcatgctgctgcagccgaacagatccatcgctgcgttaattcaacaactactgctcaactttttttccatcatcgagcaagcctgtcggtgaatgaaaacagcacgcactacatttgcataaccgtttagtcgtcgacgcgtttgattcggttgccatgtacgaagatgtcatgcgatgaagctcaccgataacaagtgtttgtgatacttgttacaaagctttcaagcgaccaccgaccaaacagataggcgaaatgcccgtaacagcacaatacttccattttgcatcgttactttgcactgggtcattgtatgcatatatctgtcatcgtcgaagtgcggctctaccccaagtaacagagcaagaaggaatccgcaccataccgacgcagcttcattcacccctctacgaagacccatcttcatttgatgtcgaactagaaggcgatagccaagtgaactggaagctgtagtcgtagcctgctgaattaggtcggacgaacaaaaaagttaattaaacatccccacctataccattggtaaatagtttcaagaactaacccaagtgccgcagtgaacgctggacattgtaaaatagccagaaggtgaggcacatctgcacatagtccacttgttttgtcaggataatggcaacttgcttgattggcgacagccccagcatgcgcttaagcatgaaggccaagagcagaaacgatgcgagttgcagcaagcagtagaataaaacatttgtgagcgtttccaggagctggctttggtcgatgccgtcgtatatcgcgtaatactctcggttgggtaggtaatacgtggcgactaaataggtggctttcacgaaacaaaatagttagtcaaacaataaatatcgagcgtgacacccaccacgcgtacgtatagaagacgagtgggatgataacttcgccgttgttgagaaggagaagaaactccgtcatgcacagtatccgccggacttttcgtgtgtactccagtctatcatgaacactcattccagttgcatccacgcccacaccctcattgccctcttcaacgccacatttgggtccatcagccgcgtaaacacgagcgcttggggtgttaaacgcactccgaatattccacattttcttggtaatctttgctgccaaccttggtccttcccgctctcgttcctcgtcatccgattgctttacctcaagctcaagcaattgaaatgagtgggtatcgtctacttgtagctggggctccctctcaagcagtattctcgctcgctcaagagcagtcgacttgccgctcgcactgacatgaccgccagtgtcatgaaaagtattactccaatcgatcttccgctcaagctcatccaaacctctacgcgctttttcaatgtcacgcagcgagatcccaatcaagcaaacgtctattgccatgagctccatcgtcgtccagaacgaaggtgaactctgcatgcagtacgctgtgaagagcgaaccaaagacgtcggcgttgaaaatcacaagtgtaggtgtctcgtcaccgagatgccccacagcacgagcgaacaggttcctcatgaacagtttgatcaccggtagcagcagcgtaaacgccatctgagcgtcgtgctctagcctggtgaaaacgtaataatacgacgggtagatgaagaacaggaggaagtcgcacatccacagcttggtcatatcgacgagcatcgtcactgccttcgggtgttgctataaggccttggcccattggattaccatgggaattaccgccagtggtaaccagacaggcacaagcagcactgttgtgaacggtagtgggaaaccaatccataagatggcgccatacagagccccaaccgtgagtgccgccaccaccagtgtgtctcggatgactcgcgtcgtagggtacgagagcaccgtacgtacccccgtgcgaaactggtgaatagcgagaagtgtcatcaccacgaaacagtaatactccctcgccaagaagagtttgttggctttgatccccttcaacgggtcgggaagtggcacgaagtcgatgaggagtgtgaccaccagacacggccccggggtccccatgaaaacagctatgacgggcgcccacgtggtgtcgccgatgtatttggccagatcgaccgctctccccgtcgagtaagtgccgtgcagctccacctgcgaggcctcccacattgtaaacagcgataagcgcttacaacccatttcccgcgaaactttccaccaaaactcagactgagtcggacatgagcgtctttgacggagagagagctattccggaaccgaccaggcgatgaggacacgcaagtcagaccaagatattaatataagttttgttcttatcgatgcgtttcaatgttttcacattaaattgggcaaacaagcaaactcaactttttataaggttgagcttgttccgagctgtgttatcgcctgcagttagagaagttaccagcaatgctttccatataaactcaagatccaatcggtatctatctccttgtttgaagaattctttaatgatgtgatgggtacaagaattgagaaaatattattgtaggataagtcctgcttggacggaaagccttgccccgtacgagataagtcgtcaaataggccaaccacgatcgcattccctcctattatagcgaatcacacgcatttaggggtaggttagaggcgcgccagcttatttccggacttgtccggaatttgaatttcttacagtgaaataaaccatactgaaaccaagtacaaagtttggttatcgaataagtgctctttagttcagcctggcactacgctatgaatagctacaactgcggtgtctagctgccgtcactctcattctcacagttaacgcatctggaagagcaaccgccatcatgcggcgcgctgcgcgagggctagacacgcctgcagaatgagagagagaacaagtggaggggatttacacatttcatataagtacgaaatttagctctttacactcccgtccggaatgaataagtcgaagttgattggcacgaggttttttatgtgtcgccagtgtggctctattgcagatttgacaggtttccggattccggtccggaatctggcaattactgacggcatttattttattttattttattttattttattttattttattttattttattttattttaccagattcagggtgaaatacaagagctgcacgtagcgccatcagagtataatgcccgcatttgtttagggcctttgtcgttcgatgcgaccgctccaagggagcgagacgccgtcgaggaagcactttggcaactcgcaacagcagtggagaagcaccaaaagctgtacggcgagatgttgacgtctttaaagcataattttggctttagcagtgccaactgcacccaagtcgtgaaggacaaggtatttgaatacctcgttggcacgaacatcgtgcgggtaagcaagatttttcaacttggggtgtaattttgacgaggtatgttcatcctcacacgttgttggtgctcgcagctacatggagatatccagacaatattgattttgatgttgtagctactatcaaacagtttgctcttgctcgtggtcgtggttcgtcgctgtcgagcgtcaagaggcgtttagccgatgacttgttgtatttcataatggaattgggcgaccggtaccagcagagcctgaggccccatcgcgtgtaacgctggagtgaggtccactcggaagcggaagtatacgccagacgctgactatcaagacgagcgcgcagcttctcgaccccggacgtcgcgtattacccaagcagccacgccacacactgaaagggtcgcagtaaacttgccccgagaagaccgaagtagcgttaactcgacatgtgaagccactccccgcgcagacgacgaagccgacaagtccaaggcagaagtgtatcaaaaactggttcggctcctgttccgcgaccgagagtcttgatgctatgttgtcgattgaatttgcggtacgttgaatgcggttgtaggtctcgatctcaatcagaaagtccgtcctgctcaagtcctgctgcatttacgtccacaaaaagctcgtggtttcggccgcatgtctgaaggcaaaacaagccaagagggcgcgtggtgccacgtactggaaggcctcaacaagatcagggcgcgccccagaactggaagtcccgcctcggcagcgattattcctccgcgttcatcgacaccaactcaactcaagaggaagagcagtctggttgttgccagcgacgacgagatacataactagcggtgatgatgacgattgggcgtagaaaaaagagtattcgaggtttcatttttttcaaatattacgagtatttcgttagtgcagctttgcttgttccgactgttcgactccaagaagtaggaaatcttaatcgctatcaacatcgtggcctacaccacccggttcacttcacgtttggaaagcagtgtactaccttgggtgacaacgggcccgctcgttcgtgcagtacggagcgagttggacacccgcgcaagggcgagaagcgatttatctaccagggcatagccagcgctcacgcaacagcgtcaaaatcatagatttaaagatcgtaacatgcatctgatcgaaaaccaattcaaagccttgattacacttagtgcgcaccattaggcggtaaagacttgagacctactgaaagatgtcactccacctgcccagttttccccggtagccgtatcgttcgcggatgttgtcttcactgtcaaacatcacgcacgccatctccgggttctttcgactatcaccgaccccgcggcagtacacgatcccctcgtgaggcagcttgatcatcacgcgcctgttgtcaaagccaaaatcgtcctcctcccgaatgttgaactttctcggatttccagcggtgccgcctgagaggtacaggtgcgggaaatggccaaccatccgatagtagacctcatcgcacctacagtacagtagcaaataatatataatggttgttagcttgaaaatgctcggtacagcttcaaacacgattaaaatttaccatcctcgacgaaaacctatgagatatctgtcatcaatgtacccttcgtcgcgcacgcgcactccagcatcgctgatacacgcgtgcggatggtttgacgtagtcgtatccacagtcccgggggaaggaaggtagcgcaagatgatcaacttttcttcagctgatggtgtaggcgacaagttctgagcatccagaataaataaaaaacaaaaaaaaaactcacatcagacctataaaaaatactagcaaccacacaagtacctcaagatcgagaagcaccgacatccctggagcgagctgctgactagcgctcgtacacggagcgaagatcttaaatgcggcgcggaaacgctcgtcgtgagccagctcggcaattctggttccagtccacaagaatttgggcgtatcattagaatcggggaatgccagcagtttgtcaccgtgtcttgccagctcgtcgagtttatcggagcgcacgtgcctcacatacacggctctggctgccgcgtaataaattccgttcgctcgcagcgtctccccgacagtcgagacagtttttgagaagacgaggaatcgactcgagccgacttcgactctcgtcaggcttgaattgcgcgaaagcaggaaggtttcgattctggtcgccaaagacgggtgcatgatcctggcacagtcgatcggcgtcatcccgttctggttcggactctgcagctccttgatcagggtgtccagtggcaagaaggacatcatgatgccgaagaattcgcgatctccgatagctgcatcatagtggaatagttggatgcgctgttcgtgaccttcttggacaatttcgtcaagttgtgcgacgtcctccgttcctttcgcacgcgctattagatcttcagcatatgagcctttcggcggtagttccaggaaactcacgtacttgtcaaggcccgtcagtattgactgggatcgacctgctgtctacatggcagttggccaaagggggtgtttgtccgagagtgtggtacgttgcatgtagttgagtgtggttggctaagaaaagaatgaatcactttggaattgcctcactcaagacaagagcctcttctccctcgttcactgcttctcctcgacgtcaagactctacactactcgctgcttacttccgggcgccgcgctgctacactcaaggctcgacgctgttcgtctcggagcgcaataactgctacagcatctggtggagcacgaggaatcagcgggttcaagactctcatgccgaaacttgggaaatgagtttaaagattcgctcttggggaatgcgtttttcatgattttgctcgtttgcaactgagtgatgcaatctgacctagcttttttgtcgccaagtattttcctatcgagcttttccgagaagaagagttgtccggtgctcaatcttccgatatcttaatttttaacttaaaagtcgattgcttcatcctgtgattcgtgttaatgctatcagtaggatagggtttttcatcttagcagcttcactcgatcacggtaatgtcaattggcgctgagcgcgagggcctgcagtttcaagcacctcactctccgatgccgaagtcagcgcgatcctgacagaatgggaggacctcgaaccagagcacgtcgagctctttgtgtcaagcggcgtgggcagaactctcatccgcctggaagcgcagcgggttccagtgctcggaagagggccgattgctgttgttgtgtcccgacctaggtaactacgaggcttcaatggcgtacattcgtggaggaaactacggtctacctgccggagcccctggctggcgcgagtggccaggtggcgtggcacccgcggacgggactaccttgactcacttgctggcaggtgtggacgcggcgcctccttttgctctgggtcgattcatcgccgagcgctttcctgctgcggtggacaagacggacggagcaggtatgaacgtatattatctaccggatttggaggcgtttggcgacatctgcgtcgccttggcgaactcgcggcagtttttccgaaaagcttcgcaactccatgccaaaattgagcccccgttggtgcgcgccttcctcctcgacgaaatcaatagacgtatcttcaggatagggtcagatcgaacgtggctaaagaagaatctcagtcttggtagtttagacacactggcgacacataaaattacttgcgctaatcagcgcccacttattcattccggacggcagcggatagagtgatatttgcacttacgtaatgttatatttctctcaatctttctttggagtggcgcaggatgcaatggagggcggttaagctcgccgcggcggcacgacgggcagcctgcagccgtgcccgagcaaacggaggatgtgtcgcgtacattgagtggaaggagcggcgggccggcgctgtcggagcccagcgcggcgcctaacttgtgggcatgagcgaccgcggcacggtgcgctgataagtggcggctacatcttcgtcaagacttacgacgcgcacccaatcgcgcctacaccaacaatattgaagacaactggcctatatccgctcgcgctgtgctcggcggcgttcagctcggcgtacgcggcgaagatgcgctctccgggcgggccggaagtggaccaagagtcgccggagcgcctggcggtggtgctgtacgcactagcgacggggtggagatgtaagaacgcgtgcatcgccgactcgggcaagagggaacggcgtgggatcagcaggcacagacgcgcgggcagcgcgaggacgagctacattcaagtggtgcgggaggagagcgcttcgggcgagactttgactgcggggcccctggatgtagtgcggcaggagcaggaggacgtcgaaggtgatgaagctggaggaggagcagacgggtgcagcatgaagacttagaggcagccggccgcgtggcagcagatgctgcggtgcagacggaagaccacatccccgaggagacgacgaaggagaagaccgagaaggccgcgacgaaggaagaggctcttgcgacagcagcaaggcggtcggcttgtccgcggatgccaacggcgctgtgaatgtcttgggtacggctgggcgtgccgcccgcttgaagcgatgtccgccgaccaagacgacggagtcgatgccgaccaaggtggcaagcgcagtgaccagcgaggacgtgagcggtgacgcgacccgcagcgcgctactacacctggacgcccactggacgagcggcaagggagcaacctcgaccccaatgagacgatggagcaggtaaatttcgtcaagcgcgagagcaagaccaaggacctggggcggcacttagcgcgaacacgcagctgcaggacggccaagcgcagtgcagctagtaccagtagacatcaagcccttgattgtttgattgtttatcgatcaagattgctacatattctttcatttatttacttgaccattctgtctttcatttactttactaccgcgcttgctgggttgttggagtcggccttgaccttccaactacagtgtcgagcagcttgggcaagtctggaagtggctacatccggcaggttttgctcttatcgagtaagtacgagaaacatttttagttttgtatggttacttatttgcgcgaagaaggaaattccggacgattccagaaataagttggaacgaaataaccctaaccctaatgagcgacgattggatgaaaataggtcactgagcctcaaaggataagaaacaaatcgctgattggctacagcgatgtggcaagcttatcatagggtcgggtttccggccaaatactacttatcctacagcaagagcgaaaaaaaatacgccaggtaggaagctaaaagcttaccttgagccccgcagccagcctaacttcttgatccaccataatctgcaacggtgttatctcccgcagtgacctcacgatatcagtttttgatccgaataaagcccgtaggtacgctcgactctcatccactccagcgaggcctgaagctccatcgtgtttcttcacgtctggggcaaatgtaactcgcttcttcggccggacatccatagcaaaaggtgcgcacttctttgaggcagctgggggcaagctcgtccgatgtagaattggggtaagtcttggttgtggaggtggcatgctgctacagataacgatggaaaaatacgctccaccaaaaaatacgccatgcgacaagtcccgaacacgagctcgtatgtcttaccaaccatcactacaaaaaattactggcacggagagcaccgcaaagcatggcgtgacaaaaagcatggcgtgacaaaaaattactggcacggagagcaccgcgaagcatggcatggaaagtgttcgctgtggtggacccgttgccagcgaacaccacgtccacttgccagcccctcgacgtaaacgtgatgggcccgctgaagtcggcgctgcgcagtacatgggcttaccgcaaaagccccaaaacggcaaaagaaaagcgccttgatattatcgagcgcactatcatagcctggaacagccttgatgaggacattgtagttgagagttttgaaaatgcgcttcctcagcactttgaagctctggaattcttgtagccacaacaatacactccactttttctttgtcacgaccgtaacttcctcgtcgtctttttctacattattgacctttctctaggattaagacctaacttttgaccaatcataggatagtggtcagtgctggcgtatttttccgtggtcatctgtactgccgtcatttaccgacaatcttgggctctgctgctgcaggtctgtcacattcacggcggcttcctctgcgtttcttctcatgtctccataccacgcgcgaaatttatctgcaaacttgaatttcggatcctccatcaaggtctttctcgcctcgcagcccattatcttgacgtacttcagcagctccttggaagaccgcaactcttccactaccgcttcattctcggcagccagcagctcgtatcgtgtcaacagattctcacaggtagattttagctcgtcaagaattgacaagatgtttccaggggtgcggccgacgtcccgcacgaatgcccccatacgcacaaagcgcaacacgaccgccatctcgccacgcgcggcctccacccccgctgcagtcacgtcttgctccacctgctccaagctgcgagggcaaacgaggaagtcgtcgacccccattccaaccaagtagtcaccggcctcgatgctgcagatagaggaaccgtcatcggtagacgtgcccaccactgttattgagctccatcgagaaacttggcggctcattctgcgtctcagttacctggaacacgtgcgagttgacaacggcggcgactttcaggccaacgtcttggaacttcacgtcatcaggaggtgcttcagacagcaagtagcggacttggtacgtggatcccagcgacagcagcttctgtactacaagaacgacctccactcgccacagacgcaaggccatatcgagggctaaatccaccgctgaggccgctatgctgggacgttggtcagataatggcaaagattcgcggtgacaggaaaattggtcaatcaaaatcggtgtcatcgactgggcctcagtatggaaaaatcggcgagcgtggcgttggtatggaatcggttagatttaggccgtgttcaagcaaagtgttatatagaataatcatgattcccacgcggtggtcaaattaaaatgaaagttttgcagctaagtaaatgtctataatagctcgttgccaaagtttcattttgtagatcgaaaaaacttcaatacagtgcgccaactcatctgcatcgcgaggatgcatctcccagtgtcctaacccgttgaaacgactttattagaacagtggtgcttttatccgcgtggaaaacgtgttttccgcgtgtaatttgatggatttcagcgtgtgataatttgttattgcgcacactcgttatcggatcatgaacaacgaaccatacacgtcaaacgaagaaaaatattttttttgcgaatgatagctatcaaagtaaaagtcgcaccgcactagatcatacaaacgaatagaccgatcgtgcggtgaaattcagaacatgtacgagttctcgaataacgtacggctacgcgaaatcaatctcccagtactgtagtagttgccgtctctaataaaccaagatcgtacctccccatcgaagtttctagtcgacgtgccgctctcgttctcaattaccagaggtacaagaacgttcctgtttattggaaatcctgacttggcggcccgtttggtcaatagtttagggattgcgttatgacctgtgaacgtcgtatcatgctgtcccattctcggctgcttacgagggcgacctggggacctcggtgctgggatcgacttcaccagcacctccaaattgaagccatcacggatgccaatgcagtcatccagacacataaacgccttgcagtcgcgatacttctttctggtacgcagtatctgagcataccatagttacgtttagtctaggattcgaacccgctgcttcctctccgcttcttaccaagtcctgtgcgtttgataaatgtagagcaagttaacatttctgagtttgtgatgaaaggaagcgccaacatgtattggtatagcaacgcaagagtcttgcgtgaatcgagaccatcgcgacagcatggaagcactaccccctaattttcatcccactggctgccatagaaagaaaacttctgagtcgataaggtcgagcagtgcagcgctgtcgcttacacgcggggcacccttccttttccggcgtgatcacctctcgcggcaagctgacgcaggttggtagcgccactggcgagggcggcgacacttgcttcgtcggcatggccggacgagggccttttgaccaccggcgctttcttttggggcgggcgtccgcctatcgaggccagctgacgtggagggggaggtaccatttgttgcggcagtggtgcggatttgggcctcgccacgacattggttgcctgatctctcaagttgcgcaccgccacgcttgatggttggctctcagccagcgaatctgttgccgaagcgaggctcaggagagtagcgaggaccagagttgcgacaagcttcatggtgcgtattcgcgaagatactggaggagggggccttggaccgcgttggtgaattggagaatgagaccattgcccagacttggtttcgtccggtgaagtttacagcgtcgcagtcgttggccagcatcttctacgagggaggacccgttagctcatgccgtaactgcgagcacggagacgaccgcagccaaacgactaccagctactgggttaactgaaaccgtcccgttatctcgtaacccaacgatttcaacgatttcaacgatttcagcgaattgtatcgatgaagagttgaggcttcaaacggtcaggagcgcggaagcatttaggtttagaggcagtaaagtaagaccatctcttgtcggcagccaacgggatgcccaacttcatgtggactggatccagaattgccgagctggctaatgaagagcatttccgcgccgcatcttagatctacgctccgtgtacgagcgctaatcagcagctcgctccagggatgtcggtgcatcttgaccttgaagtacgtggctgcgcaaaatattttcttgtgctggtctgatacttaagtacgagttcttgtgttgtttttgtgtttctggatgctcagaaactccatccgctgaaggaaagttgatcatcgtgcgctttcttccttcccccgggactgtggttacgacgacgttaaaccacccgcatgtgtgtgtcagcgatgccggtgtgcagcttaacggtgcatacagttagtatagccaaggactttaaatgggttttcgattggatgcatgctacgattgatgattgaagtctataacaggagtgcaaatcgacgagcacctcacagagtcgccgagcagagcaaacggtactagagcaaaaacaaattctaatctagtttaccacttgcttcatcgtcggtagaactgaaatgctgaaagcgcagttggcgcatgtgagcgagacacaagcctgcggctagcaacatcgttttacacttccaccgcaagtgtatctatcaatctcattcatcgggcgaaaactaaattttcgacgggcaaagtgagttactatccggtgaacaaacagtaatataaaaaagcgaagcttcatcgtcgctcgtttcatttactgacggggtttgccaaacctaaacagaaacgcggcttcgttctttttcaggttactccgacatctatcggaatacaaattctatcggcggagctggtaccctcggcgcaggcgtcgggtaatagcgcgggtggtagagcggcttcgggtgatttcagcgttccaaacgtggggatgccaacttcctcgggttcttcgccttgtccgaccgaccaacgaactgcgacgactctgggtcaatttcgactcgcaaggtccgcgcggcccagtttgagtccgtatcagctgacgcatcgactaccgaagcaaacctcaggagcataccgacgaccacagttgtcatgcacttcatcgttgaaaagctgccgaccgcggggcttcttgtggtcttgggccgagttgataatctgaggaatgaaaacctcacttcgacccgtggtattctcgcacactctttagataaaagtgcaagggttcttgttcgttgcgtctgggaaactacgatagtcgagagcggttgcagaaggcacaaacacttggatagcagctttcccaaaactggaaccgagtaccgttcagtccacctctcaatacgctgggtacagcgatgttaccactggactctacgttgaaacgcacacccgcttggcctcccagttggcgaatcagacaaaccgaaaatagtattttttggcaagtttcactgactacgcgatattgataaggcacgctttagccacgcaggaactataagcaaactgccaggtaattaatctccccatgaatttatctgaattcgcttgaattctcgtgctatgctcactaggagcgccggatggagtcatgcgcctttcgtggtcaaccattcaatgccaatttgcccgtactttgttccaccttcgacttcggctacagattggtcaagtgtcatagagggttgcgcattttgtttgggggttccnnnnnnnnnnnnnnnnnnnnnnnnnnnnnnnnnnnnnnnnnnnnnnnnnnnnnnnnnnnnnnnnnnnnnnnnnnnnnnnnnnnnnnnnnnnnnnnnnnnncctctatgacacttgatgccaagtgctagctcaaaaagtaccgtaagcgagcataagcgagctcacttgcaaaccccgcactatcattaaaaactggcaaccaccaaaacacacaacttcacttcactaacggctcgtcgtatacacttgtatacacttaactacggtccgtcgtcagagaggtttccgtcgtcgtcgtcatctccgtcagtctcgtcgtcactgcaaacaacgaggctggtctttcgttccacttgacttggtgctgcaggacgcggttggttaaccgctgtcgaactggtggctcgagtcctcgacaagcccttgatcttgttgagctcctccaggatgtcgcgccacgtctcgttcgctgctcgtctggcatccttcttgtttaagcatgcggccgaaatggccagctttccacgcacgtaaatgctgcaagccttgagtggaggggcctttttcattgagatcgagacctacagccgcgtagtacaaaatacaaaaggattaactgacaataatatcaattcaaggaataaatccaagcacttaccttgtccttattgctcgactgcgtctcgttgccggcttccagtttcttcgccttcaactgcttctcgttgagtcgtttggcccagcgcgtcttctgcacaagacgcttgttgtaggtagcgaggaacagcccccacatgttgagaagttgatccaatctgctgacgagagtcgagatggctttatctagcgcatcctttgcagacattgctcggccacaagcctcgtcgaccacattctcggtcactgagagcacacagctaacgtctccattttcttttttcgtcgttgtccggcagatctgaatcaatgcaacagtaaaaaaatgtaagaaccatacaacaacaaaggttagatttagagctcttaccgaaaaacccgaaggaagcgaaattgtttccgtcttggcgctcaaatcccacacgatgcctctcacagctccgatcaccttgtcccgatcgaggaacagaagccgtagcagcttctgataaacttctgcctttgtcttgtcagcttcatcttcggtgcgaggaacggcttcacgtttctggttaactccactgcgatcttcagtgaaaaggcttgctgcatctctctccaccagtagctttggctctatattctcatacgacgaagaagctgcgagcgcgtcggcgtccactgggtttcgctcatattgccgtttgcgttcgggttcgttatctgggtttcgctcatattgacgattcattccgcaatcgtggtcctgctcaatggaatggcaagccgggcgcatgcactggagctggcacttcttgcagcgttggacgcatctcttgaaaagcgcctcgaacggagagaggtgcgtctgctcgatcttctcccattcatccacgaatcgttctgcccccaagaaatccttcacccaaagcgccaccttggccttgcgacggctaaccaagaacgagaggaaagtattaaagttgtcgtagtcgctcgcgcagattcgatcgaactcgcccttctcagctttcgccaggtaacgccggaaaagtgccacgagcgtcaagtgaacggcctcattgtcaacttttctctctcctcagcgcagacgaaggggccaaagtcaatactttcgtcggtaattccatgcaaggacacctgctgattaacactgttccagccttgtagtagattcgcatggtcgcgacccagctcgtccaagcacaacaagaccgaacttcgtgcctggcacagtaccgactgcttcatgtactgcggcgggctttcatcctttgagtgataatccaaagggatcaagcacccagtgcggatgacgcctggcgacttccgcaggagatcattcatctgcagtttatcggacccctcgttgactccagtccaatccaagatagagattttcgccagaacaagacgaatagtgtcgtggaacgagcgaccggttttgaacctccgcgcctttgaccgcttctggtcgctgattgcttgctcaatccattgacgcgcatggcgaagcgaatcattgtatcccgtggatcggaaggggggcgagcaattgacggtcacttggcccgactacatttccgtcacgaaattctggtccgggttagcctccaaaagtgcttgaatcttgcgttgaaactcggaaacaacgcctccaccatcgtccggattgatgtccttcacgctcatgtacagcatcccctgaaaaagacgctcgttgtccttcagaaggccaattcccttctgaaacatcgtgaacagaccgtcaatttctttgtccattcgcatctcggtacggaaaaccgtaaacatggacaacgaggcgttcaatatcgcaaggaaaacatcttcctggtccgtccgctcaaacgaccccagtccttcgaagtcgagaatcacaaacatgacattctgcatgatgcgtagcgtcatccaggctccatccgtgcaccggttccctgcgatagcgaatgaggaccccgttaaatggttcaggaagtagctcttgcccgtcgactacttccccatggacgtaataaccacacaccgaccttcccaagctcgcaacatcggagacaagagaccaaagcggatggattcggcgatatccgccgactcccacgtcgaaaactccgcgtcaaggctatcgggcggttggtccactccgtctaccaggacggtcagtgcattcgcctctgtgcggcagatctggatcggtagaaaagtgataagcgtctgaagaaacgaatccagaggcttcaccgccgtgacttcacacagcgaggcacgctgaacgcggagatttttcgttaaatccaatccgctcagctccttgttgagcgccattagatcgctcatcaccaaggaaaggaaatcgtggcaagcctcaagagcggtgggaccaccagcatctgcatcaaccagacaagtcacgagaatgtccaccggagtcttggcttcatcgtccagcagaccgattactgggaacttctcgaagacgtggtaaaacgtgtacagccagtgctgcttgcgcagacatagaccgccgttcgcttccgttcctgaggtcttcttgtcttcatcctttcgaacccggaaggacccgctcctgacactgacgtggatagagaagatagatatctgccgcgccacggggtccagtacgaacaccgtgtcatcagtacactgaacgctcactccttcggacaggaagctcttgtctagctgcagagttggcagctgtcggtaatcctcgcgagaaatgaccgacagatctgcgacaaaagacccatcgccagtcggctttagcgacaaagtcccatgcgcgagattatcagcgaagcccataagtcggctacgagaggcgttcgtctcggcagatttatgcttgaaggcctcgatgacggtcgaagtttggtcactatgggtgtctatactttgtgataacccaccggaatccgtcacgtacagtgcattgtccaacaaaaagatgtcggtgaagggcatcgccgtcagcgtcgagcacattcccagctccaccgctttgacgcgctccatgctcttgaatgactcgtcaaacttgtagatccccaccgagtcctccgataggaacgcgattactcgactccgagcgtcaaagtcacagacagacgcgcgctttccaaacgtgcgtatgatggtctcttttgccaatggagagcgccgaacctcgcaggcacgagggaattgcagcagcttaatgcacatgcgctctttccccacaacaacttgaaccgccgatcgcaccttgacagtgaacatcgcaacgtgcttctcgttagggttcaacaagtgttggccatgaacctccacccgtccactggtattgtccgcctttgcattaatctccagcttcgcgatctcgttgaacgcggtggcgggcgctagcacctccctcgtgccctcacaagagatcaaccccttctgtgcactcgcagtaagcttcagtagcagcgcattctttgcgagtaaaccctcgcgcaactcatcgaattggttttgcacgatctgtcgcgagactttgtccagatccgacttctgtttctgcttttgcttccgcttcagagcttcaagcctggccgatttagctgcttccagcctgttctcaactacgagaacccacttcgaccgcagcgcggacaaaggttcagccattctctccataagcgattctgcatcagcgatacgtcgttcaccttggccagacccccgacagttagcaacggcttggtcaaactcctctttactggacgtggcacacagttccaacaactcgccaagatcaacgcgttggttttgcgcgtaaagcttgggaagagcagtctggacgacttgaaggcggacagggatgtccagcgccagtcgtgacttgtgatcaatcttccggttgtccgtcgatctgacccactcaagaaaagtttggtatctctgcaaagcttgagctttcgctgaatctgcggtattgtcagggctgagctgaaagagcgcgttcgacgcgccatccacgagcagccgttgctgcgcaatgtcatcctcaatgtgctgcagattgagctcgtacttctcctgctgctgcttcgagtgtgcactgcgagcgctctttaccttctcaccaggccacacgtcaaactcccggagaatgctctcgcagagctttggtgaccgcccaatagttccactcaaatcgatgcggtagtgctgcgactcggccttcaaccaagctgcgaaagacacctgtgccttcgctggaaatgttcgtcggaatgggtcgctccggactgtcgactccattgtttttgtcattgcaatggctggatagctccctttcagcatgcacgcgtccgaagacccttccagaagttcccccaaatcgacagagctcacttgcttgcactcggttgcgtccttcttgtcattttgcttctcgacatggaacgagaccgagtacatggacagcttctcgtcctgctgcttctcgtactcggtcatggcagtcttcaatctcaccaggtccgacttcgatgtgcagcacacgacgtctggcgccaagacggtgaggaaccgcagcacaaacgcaggagtgtcgcggagtgctttcggttcaaatagttcgtcttggatccacgagaagacgacgagtccagcgacgtcttcttcgacagctccaacctactcaccgccgccaccttgaatcttggcgcagtagaccccttccgagggcttctttagcgatgcagccgtctcagccgagcacgcgcccatagcgaccagagcggatgcaacctcattttgcttgccgaagacggccttgaacttcactttactattatttgcttcaccgaacagaccattgcggaggaaagggatgacatcctcgtcgaattctccggcctggagcacgccaaattcgaagtctttggggttcacagacgacatcacgccgaagctgcggcacaaacgcagcacctccaactcgtccaggacaggcttgaccacctccacctcgcactgcgtttcgcgaacgagtctcattaagcgaaagcgacaatcgcgaggcaattggccgttgccaccttcgccagcgttcatcgtcgattggggcgcgctcagctttgccctctagccagcaaattcaggtttaaccagcccgcaaatcattgcaaccaccgagtcacgtactttcagctcgtaatggtttgccgagttctggagaacttgcagcttctgccagttgatgcaccctgtcgcccatggcttcacaacggccattgaattatacggcgtgtgtgaagattcttcactgaagaacacaactcgccgggcagaacttgaagccgtcgaggtctgggccacgcagcaagtagtactatgctactagtatttgccatatacactcatgccccttatggcagcttgtgtgttgtgaaacctgacggggatgccaacctaaaactgggaagctgcgattcgtaccatctctttgtcgcccccaaaagcatggcggcagccatcgccttcgacaagaacttgagtctctggcgtgtgaaggtcgctctggcggctcggaagctgctgtcgcttggacgtgctttcgaggttgagtattcgctgcctagtgaggcagttgacgagctcaagtttctcaacttcggcctccgcgtcgctgccgttgtgggctcgcacgtgtttcaagtctcggagaccacgagcgagcccccacgcttcccgatggagtgcaaggacagcgtggcgggcagatcaacctacagccaccccatctgcacgattgaagccggcgactacttggttggtatcgggacgggggaccgtctcaaggaggtggcgcaggacgtagcgacgctaggagcagaggctagtgtcaagcaggagcagagcaagagtggcaagaagaccgtcgtgttccgctttgtgcgtatggaggcgactgtgcgtgatgatccgaggctgggccgcacgccagggaggatattgcggattctcgacgaggtagacaccagctgtggactattgatgccaaggtacgagctgctcgttgcgcagggccaagatgcagcggaacagttgcaggtcgcgagggaattgctcaagtcaagatcataagcagcgaaaccagaaaatccgtgatgaaggatcggaaattccagtttgcagccaagtttcgcgactggtatgcaggcattaagaggaatttagaagagggagttaccgtagtcaacaagacgcaaacgcaccaattgccgcagaacgtggtggaccagacgacatcgccaaagttaccgcttaacgacagctacagccgcaattccccagcaaattcgagtctcacttcaattttgcgtcggagcagcgcgcctggagcaccaaggaatgcctcaacgaagcgggtcactttcgctatggatctccagcaaaattcttcgaagaaacgagtgactttcgccccagatgtgaaaggttctactccagaggcgcagcgctatgatgctccgaaagcacccaagcccaaaattgctggagtgggggagagtcgagtctacctgcgaacgttgctcgggtcaaatatcgtgcagtcgctgcagcaaataccattgtcggaggtactgaaggaccaagaaatcaggctgagtgaggagctaaaggtaactttctcttcctgttgttgattttattttctagcacgcgactgacagtaagtttttgtcataattatttgaccagcttctgagcaagatacgaaagattggacacttggagtacagggctctcattcggttcgggcccgtatcggtcgatgtcacggcttcaagggatcgaaaatccgccaaagaagcgctttggcaactgacagcagaggtggccgagcaccagaagctgtacggcgagatgatggagtacttaaagagcgagtacggcttctgcaaggccaactgcactcgagatgtcaaggacgacgtcttcaactacctcattgacaaaaacattgtgcgggtaagtctgaatatcggagatggggttgtttagagagaaaaaatattatcctaacactacagcgttgttgtgtttgcagctccagaagagggttcttggagatcctggtaacattacttttgatgttgtggcgactataaagacgctgtcgcttgctcgcaggcaagggtcgtcgctatcgagcgcaaaaagcgaggctgctgatgcacttctgcagtttctattggagttggtggatcagcacgaggagagtcaggctcttgagcgcgtcgagcagagccaaccctcccagcacaaacacacctacaagtacaatggcacacaaaggacaagcagggattatcctgaagctgatcaattgaggtctgctcgcaagcgtcaatatgagcgaaacccagataacgaacccgaacgcaaacggcaatatgtgcagtccgtcgtctgaaaccagctacactaatgacactaatacggagagctcagcggcgtacagggatcaccagagattgggtcgttcagaaggaggtcgaggcgccaggcgcatttgtgttcgatgaaaagaaccaaattgtggtgtatcgcacgcaggagcgactaaagatcttcatcccagccgaggacatcgagatccagaacacggtcctctgggaactacacgacattgctacagcaggccacccaggcgttgaaaagacaagtcaagctgtcgccgaacgcttctactggagaaaatggcagaaacgcgtaaaagagtacgtggcgacgtgtgaatcctgtcaacggaacaagtcgcggcccggaaaacctccagggttactgcacccactagaagtccctacggctcgatggtcctcgattggcatcgacttcatgacgggtctaccaaagacaagcaccgagttcgactcaatcatggtcgttgcagatcgactgacaaaaagggcccatttcgtaccaactgcgagtgacatatctgcggaatcgctggcaaaactttttatcgatcactacgtgtgtctacatggactgccagcagacatcacgtcggatcgagactccaaatttacgtctaagttctggggagagtgcgcaaaattgctggggaccaagctgaatctggcaacggctcaccaccagcgcacggatgggcaagttgaacggacaaatgctatcttgtcaacctacctccggcactatgtaagcggctatcagaacgactgggatgtccacttggtgctggcagaatttgcctacaatcgccagtaccaggcgacgatcggcatgtctccattctacgcggatattgggtacaacccgcgcgttccagcagatactcaacttgcggacctcgaaaaaacaccggcagtggcgtttgtacaacagcaggacaagatcctccgagagttacaggccaaggttcgcatgggagctgaagaaatgaagcttctgtctgatcgagggcgacgagaccataaattcgacgtgggcgacatggttttgatctccaccaagaacttcaacccagtgacggtcggggcggtcaggagaaaattcgcagccaagtgggttgggccctacgaagttatcgcagtgttgcacgacggcgcgtcctatgagctaaatctgccaaaggagttgggcattcacccggttttccacaccatggtgctgaaaaaattccggaaagacactaccggcgctcagcgtgacagcaccatccccacggttcgactcaaggacggcacagaaggtcatctgatcgagacgattctggaccatcgcatcacaaaagagggcaaggagacgtacaagtgcaagtgggtgggtcgcagtgacgatgttacctgggagccgacctcaatttgctgtcagtaccagggctcattcgcgaataccatcgacgagccaacaatttgccgacaagatcatcagagcgacttcgttcaagaaccaagcacgggtcgaatggagttcgactagtccaacaatatttcgagcggggaagtttacttcaacggaggtcgtgtcacggaactaaactgttccgtgaaggtaagtttgtagaagaaagcaacggacgaccctaaaggcaaagatcgtgaagccactcgagccgagacctcgaaaccactcgagaagatctcgcgaccctcggcagtaggtagagctagcgagcccccacaatacacactttgatattttccctctattgcacaagtcctgccaacaacgtctacaagctcagtatcgcctggcggagtccctgtcaaagtcctccgtccgtatccttctcctacgcttcctccgaccgcaacgtggtgcccctaaacgaagtcctgtctggacgggggttcaccatatttgcaacatgtgtgttttggtggtgggcagtgtttgatgaaaagaagggagagtgtggggtgcaagtgagctcgcgtatgctcgattatggtaccttctttgacgagctgcacttggtagccaagtgctactcacgaaggtaccatctgatccggcggtatctgatacccggaagtcaagatccagcagctggaggcctccgggatgtgcgctccccccccctcggagcctgtaggacacagagaacacacagaacacagagaacagtaagagtctaatgtcagtttgggattagcacagcttgtgtaatctgagcagacagatcaaagtagactttagtactgtgctgcgcaggcgcagactccgcgtgacacgaagacacgcgtgacaagatggccgactcggacgagaggctggctgaacgtacggcggcgatgcggctggacagcgcaccgtccccctcgcgtccggcagacctggagatcctgatccccaaccccttcgagcgcagagacgacgaaggccacggtgcgagggacgccgagatgcctacggcgagcccgaggcaaggaccaagggatggaaggatcgcggcggcgccggcgctgccgcagcccccgatgtactcggggcgcaccatgcaagaccggcgcgacttcatgcacaagtacgagggctacttggtgaaggtgaacgcgctgcagacggagtggacagcagcgctggccatgcccgtgagcgcgtgtatcgagacggatgcacgacgcatgatcgctcgctgggagttcagcggagcctcacccgagacgatcacggaggagcagtgaaggactactttcgccaggctctggtgcctaccttcgtggactacgcgtcgatcgacacggccatgaagtccctgaagatgcaggccggagcctgagagtcgcatgttgcacttgcaggccgacatggaggccatcctcaaccgcttcaacgtcacggacctggacgtggaggtggccggagtggacgtggaggcgcaggtggtcgtggtggcggagctggaggcccgcctgtcggaaaaggagggccggacggcgtcgcacgacctcgcggtgcctggctcgacgcagcatcaagtcctgagctgcccagacacccaacccggtgaggccgaacgcctgctggcggaactgcgcgcgcggcgtgcggctcctacaactaccttgcgtcgagtcgagaccgtggccgagcctggccatgaagttgcggcagcgacagagccatcaggcgcagttgaagcgcgagtggatggactgaaagtccacgctctcctcctcgatacgggggccgacgagtcgttggtcgcccaggtcgtcgtggacgccatcaaggcccgcggaacaccggtcttcttggcggacattccgctgcgcacactgtcgccgatcggaggcaaggtcttcgtcgtccatcaggcagtaacgttccgcgaggtgaagttagccacgtcggccggacccttgatgctgaggaacttggcttgcctggtggaagacggcacacgtcgcaggacttcacgctggggcggcccatcatgaccgtgctcggctactcggccgacgaactactcgtgcgtgctcgaggcactaagtcggagtgggagcttggtgacaaagagcaagtgggggacgacgccgagacaacggcgctccagcgcatgtgccggatgcagacgcgcgcaagagcccacgcgacagccaccgagaataccgatgctgtggagagacacgagacccgcacggcgttgccatcgctccggttgcatgactcctcagccgtgcacgacatgttggattcgaagctcgcggcggcacgagcgaagggtagggggtcaagcgactgcgggagatcctgctgcgacgccaggacagttttcgtctggagtttgggggcgacccgtcggtgaaagtggcgccgctacaagtgcgcgtgaaggtcaacgcgcagcccacgaaggcgcagccaaggtgctactcaccggacgacagggcgtttcttgaccgccacacggccaagttgctggagttcgggctggtgtttctgaaccatcgctcccgttgggcgtctccgccgcggattgtccgcaagaaggagcaggactcggacccgacggccgacccgcgaatgacgattgacaccagagtcgtcaatgagcgcacggaggttatgccgtggcccatgcccgtgctggaggtcgtcctcggcggcttggaaggagccaaggtgttctttgccttggactggttccgggggtattggcagttgccgctgcacgaagactcgcaagagctcttcacattcatcacccatcgcggcatgtacacgccgacgcgcgtaccgatgggcgccaccgatgctgtcgcgtactgccagggagtggtcgaagaaatcttcggcgacctgttgggcaacggcgtcttagcgtggctagatgacatcctgggctatgccgagtccgaggacgagctactgcagctgctggaccaggtgttggctaggtgtgaagcctacgggctgaagctgcatgctaagaagtgtgacttcttcgagattgaagtcaagtggtgcggtaagatggtgtccgctgctggcgtacgccactgccctgaccgcgtgcaaggactcgttgagatgcagccgccgcagacggctggcgatctgcaacagttcctgtgcgccgtgaactggatgtgacagagcattccagagtacaaccgactgacagccggtctgtctgccgtactggaggaggcgatgaaggcggcaggatcgcggaagaaggtcaagctcgccaagttcccgttggaccagatcggctggggcgacccgcagctcgcggaccttgccgctgtgaaggctgcgctgctgaagatggtaccgctggcacacccgagcccgacagctgaggtgtgcctgtataccgacgccagccaagactcgtggggagtcgtggctacgcagttggagccaggtgaggtccagctgccactggaacagcagcaccatcgccccctggcattcctaagtgggcgctttgtggacgcgtcgagccgctggccgacgatcgagaaggaggcgtacgccattgtggaggcgacgcgcaggctggagtacctgcttctccgtcctggtggtttccgtctgtatacggaccaccgcaacctcgtctacatcttcacaccgtacgggcctgacactgcgatggctcgctatcaggcagacaagttgcagcgatgggctctgtcgctgctgagcttcacctacgttattgaacacgtgccgggagaggccaacgtgtggggcgacctcctgagccgctggggcgccacgaagatgcctacggcagcgccaaccggtgacaggatgccaagactggcggctgttgaacgcgtcagcccactcgaggctgtcgacttcgtgtggtccagtgaggacgagatcagggcgacccagctcgcgagaagggtcaaggactcgatggagccaagccagccgccgctgtgctggtcggatgaccggcggcttttcttgctagcggtcgagcgcgtgtggatccccgatgatgctgtggagctgcagctacgactatgtgtggttgcgcatgctggtgctgccggccatcgtggagccaagaccaccgcgaaggcactagaggacctgttctcgtggtgctcgctgcgcaaggacgtggcggtgttcgtcagcgagtgtatgcactgcatggccactgcggctgggaagatcccccggccgctgggcgagacgttgtgggcgaccaagcccaacgagcagctgcacttcgacttcttatcgatggcggaaggcgcggggggtctcaagtacgtccttgtcctcaaggacaatatgagcggctatgtagagctggtgacctgcgtccaagctacaagtgatgaggtctaccagtcgctgctggactggtttaagcggttcggtgtcgtccgacagtgggtctccgatcaaggagcccacttccacaaccaagtcatcgcggagctgcagcgcgcccttggggcgcaccaccacttcaccacggcctacacaccgtgggccaatggtacggtggaagtggtgaaccgagagcgtcgcttacgcgtcgaggactggccacgggtgctaacagtagtccagggggcactgaaccaaatgccggccgacaggctgatcggcaagtcgccgttgacagcttttacagcgctgccaggtggaacacagctgaccagcattttgcacccccgagaagccgtgaccacgacggtcgactgggtcgacatccaggtgagggagcatctggagacagtgcgtgtagccctggacggcatgcatgctgagatgactgctgcgagtgagaaacgcaagcgcgctgctagggcgcgtgtagctcgacgccaaggcgtcacgctgcctcgtttcaccgagggcgattttgtcctggtcgcgacggccaaagcgggaacaagttggcgctggtctggcgtgggccaaagaggatcgtgcgggccctcaacgactacacatttgaggtacaagacctcatcgagccgtacgccatcaccattcgccacgctgcgcggctgcagctttaccgtgaggctgcgcgcggccaggtcgaagaactcacggagcaggccgttcacggagaaggtggcgccctggtggaggcccttagagcgtgtcggctcagccccgacacgcagcagtgggaattgcaagtgaagtggtttggtctggatgaggtcgagacctcctgggagccggctgaggccatcaaggaggacgtgccggttctcttcgcccgcttcgtcgatgagaagcctgacgaccccgacagactccacatgacggaggcactggacgcgctggctgaccgcctgccgacggtcgctaccgcgttgccggtgccgaagaagcgccgtcggaagatggcaatacccgcggtgtagccgctagtctacagtgctcacgcaccaagctggagggggaagtgatccggcggtatctgatacccggaagtcaagatccagcagctgccgaagttcaagccgctaccgcgcgtggaggcctcgatgtgaggccaggagcgctcccccctcggagcctagagcgtctataagccgtagacgaagcgaatcggtgcctagatcgctgccatcgtctcgggcgcaagcgttgaagccattttccggcgataccgtacgtgttaaacccagggcatccttgtacacgcaagcagtgcttacctcttgaagcgacaaaggttggtactaacggcaaatgcctgcatcccctgcttctcgtccaatccctccaccagcgctcacacctctaatacgctttcccagcccttcttgcaagtcgaacaagccactttccgcgcatcaagcacgcctccactctacaaaccgaccacaagaaactcgtccaatgtcatatcttgtcattcgatagtaccagcttctgacaaacatcaacttcaacatggacggtcatctgacccctctcctttgaccagcatctccgctctcattctcgcttcggtcgcctggagctcaggtcacttcggaccacatcaaccccctacatccaccttgaccaatgctggcgaagcgcgtgctgcgtctcgtagtggagcgtccccccactcccgtgcttcggacccgtccgtctctcgcagtccgccgtggcagtcgggcgctgggcggggctttggcccagcaagtgctcgcgcggggcatcacgacgcccagcctggccaacttctcgtcctccgcggcggccgagcacgtggccaacctgccagacccgagcgaggccttcgaccgcatcgtgcaccgctcgccgcacgcagacgtcgagatcccggagcacacgatctgggaggtggcggagcgccaggcgcgcgtcaacggggacaagcccgccttcgtgtgcggcctcacgcaccggagcgtctcgttccgcgagctcttcacgggggcgcggcgcctcgcggcctcgttcgcccaagagggcgtgcgcaggggcgacgtcgtggtgctgcactcgttcaactgcatcgagtaccccatggtggtgctggcactcaccggcatgggggccgtctgctcgcccgcctcgccgctgttcgtgcccaacgagttggcctaccagctctcgcactcgagggccaagttcctggtcacgcacaagcagctggagacgacggccgtggaggccgcggccatggcggggctgagcaatgccgtcacgttcactatggggagctcggaggccacggagacgctcggcctcaagagcatcaacgacatggcggcgcagaccgagcacgacttcttctacgagcgcgtggacccgaacctgaagctcatgctgccgttctccagcgggaccacgggcaaccccaagggcgtcggcctgagcgccagaaacctactggccaacgctctgcaggtcagccatgtggagcctgagggcgacaacttcctgggcctcgtgcccttcttccacatctacggcatgatgctcatccacctcagcatcctccaagccaagagcatcgtcatcctgccgaggttcatgccggacacgttcctcaacgcgttgtccacgtacaaggtgagtcagtctagcttccacttcttcaatctctgcctgtattaacactcattgccatatctgcagatccgcacagcccacattgcacctcctgcagtgctgttcctggcgcaccacccgatggtggaggagttcgacctctcagcaaccgagttcgttgtgtcaggtggagcccccatcggcaagcaggtggagagcacggtgcacaagcgcctgggtctcaacgtgaagcagatctacggcatgacggagctgagccctgcggtcaactacggcgaagacaacactcgcaaacccgtacgacaagtgtcgatcctttcatgaactcgtcccaattcatgcagctaaaccgtgttcttcgttgttgtggttaacagggcagtgccggacgactggtgccgaacacggagctgcgcgtgcgctgcatgagcacggaccgagacctgccgccgaaccacgagggcgagctgctgtaccgcgggccgcaagtcatgctcgggtacgagaacaaccacgaggccaaccagaacatcttcacggaggacggattccttcgcacgggggacattggttacatcgacgacgacggcttcgtgttcgtcatcgaccgcgccaaggagctcatcaagtacaagggccaccaggtcgcaccgggcgagctggaggacgtcctgaaccaccacccggccatcgccgactgctgctgcgtgcgcggacgcaacgacatgggcgaggagatccccaaggctttcgtggtgctcaagaacccagacagccccgaccgcccgacgccgcaggacatcatggactacatggccgagaacgtcgccccctttaagaaggtgcgcgaggtgcagttcatcgaggccatccccaagaacgcgtccggcaagatgctgcggcgccagctccaggagcgcgagaaccgcctccaccaggcgtaaaatggctgcggacacggagcgagatgagtatgcatattgtcgtctcgatgttttatctgcgaatgaagcgtatgaaccaacaacaccttttcaaggcaaaaactttgagtcatttgttcagtttcctagtgtacatctgcgactggccgctgtcttcctggttgtcgtgcggacttcagttatccgccggttggtcttgtggctgcttcagcggcagcaactgactggaccattgcttgtcaattggttgaccttggctcagtggcgaccgtggtgtccatggcgacgcgggggtccttgctgcacgaccactggctgcacgtacacgacgcgctgctgcgggggcgggcggcgattgtagtcgtcacgacggtcgttgccgccgccgcaacagcagcaggcggtgagcgagccgcagaggcagcaggccatgtcgtcgcacgcgaggcaaatggggatgcacatggctgagcaggtggtgagagggggttgtggtggggcctggtcgcaaattgaagagtgaggagctgctggccgccgacttaacggagacggagccgccagcagagcatgttgccaagacctgcactgcaggtccagccgtgtggatattcagcgcggaatgtccaacgcatttcgccagcagaccagatgattaatctgtgacgcgcgcacatttgtatttgtcgaatggtttttgcaaaaaggatagtaggcaagatcgggataaaagtatccgggcggattttgtgtacgccacacaactgtaaaagtgcagctttttgcggcgtagccatccgggctgtgttgaagtggcaagtggcaggtttcctcggcgctcaattatctgccggtgccctccgctactgccagcaggcgcggcgtggcgcgatcgcatcgctgctggtctgattgcagccttcagttggcagaagcagaagcgaacgcgcgggctcgttgccactcgacgcgcgttgcgtttcctcttccagtaaccagcggcaacactggcgagcagctacatcgagcagcgggaggccttcgccttcctcgtgcccaagacgatgatcgggcggagacgccgctggcgccagcaagagcgcgagaaggcggtgcgcaacgtcttcgaggcgcagatgcacgcgcggatgcggcgccagagccttaagcacgcggagctgcggcgccccgaggcgctggaggccgactgcgtgacgctggacctcggcagcgcgcgctccagagacaccagtttagggcaggagagagcggctaggagggttgttaaccgtgacgacaaggcgggccagtgccagtgggtgccgcactcgatcgaggagctggaggcttcgtcttcctcctcgtcttcttcggacgaccgcggcaacattttctcgcctggaggggaggaagagggcaacgaattggtgctcaaagtgcggcaaccgctgagtcaagacgcctggttccggctggagaaactcgggggcctggacatgacgctggccgtgccggcctttgtgtaccgggtctttctgggtgaggagaaggacttcagtggagacgcaacggagggcagtcgcggtgtttacagactcccaagactgctccacaactcgagagcgaacctgccgccgcgatcggcggactgctatctatgagctcagagctagacgaacgaaactaacatattcccaagaaagagcttggctttaagctgtcgtgttctgctttgccagcctggaaaccgcatacctgtacacgacgagtctggttctggttgttacacaaacgcagctccattgtttcaacgcttatatttcgtggattcacgagtgggggagcttccgtttgagctgctctagtgtacacacgcagtggtaggtggtcgtggctggaatcgcgttcagcttctcttgatcccttcgtttctctaagctcttcacgctcagctcagtagtagccgcggtggggcggcggcgggggagggcctccctgaacaaccacggggttcacgtacacaacgctctcgggcggaggagggcctcggtcatggcggtcgcgaccgccacctccgcagcagcagcaggcagtcagagctccgcagaggcagcagtccaagtctccgcagcagtctccgcagcaagggcctccgcagtcgcagcaggggccggggccgcacagatcgcagcacccgtcaggtccggggccgtcgtcgcagcagcaagggatgcacattgggtctttggtgttgtgagtctttggtggcggtttgaggaatggagaccagcgagtggttgagtcggagacgtgggtgtacagtacagctgcggaggaacacctctcgtgccgagcgtggattctcggcgctatgctcgcgcgggccgatcacaagcatctgtgacgtgtgtgcaacctcgagcgagacatgcgcgagcgaaacacggttttttgcaagaatctgctggtcaatgcggtgccgggatgacggtacgagagtgggggaactggcaatcaagcgcagcgcgctgtgcacgctctacatgtacatgtagcattgcccccgtcgagtaccggtatgtacatgtacatgtagtcaaaatcgcctcgtactatcgtggaggagtcgatgttgctgtgacagcattgtactgtagcgtacagtctgtagatcccctttacagcagtcttcagtcggacagcaaagtcttcgccgataactcagtagccaccgatcaggaacgcatttacctgtcagagctctgcagtacatgtattgcgatcactgcacttagccgagcgaaggccggtcaatggcgatgtacagcagctcgggagactaggggtcaaaatccgtgtattccgtagctactgccgttcttgcaggcagcggctatcgatcgagcttctaatctaatactaaatactgtacagccgtgggagggcacgagcgacttgcctcggcagtcttgaggctgtgaaagcgacgggtcttgagggtgttctcttcttgtcttgcttcgcttacactcggtcgtagtagccgccgtggtgcggcgggtagccgtggtgcgggggccctcgctgcacgacgacggggttcacgtacaccacgcggtccggcggcggcgcgtggcggtggtggtcgtggcgccggcggtcgtcgcccccgcagcagcagcagagcgcggtgagcgagccgcacaggcagcaggcgaagtcgtcgtcgcacgggatgcagatggggatgcacatgtctgtctgtctgttgatcggtggctttggttggagcttcagactgttcggtgcttcgaggcagaacgcggaatgacaccgagcaggtctccgagatggctgcgcttggattttccgctgtccaacggagaccgtgattcaatttatgctgtgctctgcgacgtgtgcacacttgacgccagtattgaacctcctgtccagaaactggcgtccgcaagttttaatttgttccttcaagtactgaatccctgttgaatacggttaaatccgttttgacagtacttagtaaagatagatattacaccctttatactatatgcgacatgtagcgatatatgtccgaatgttcagtctctgcagaatatctacccaccggcgttcagaggatgaacgccggtagattcagaggatcttggccacgaggacctgccccggccacgacaaaaactaccaccagcactgaaagtgttcataaacactgtccgaccgcacttcagcactgcataatgtacagtggcaccatatcatgcaaatcgttaggcacaccccggccttcggcctactcatgcgtgtcgtttgcacggtgtactacgcttcgctcgtcgccggcaaggccacgaaaaatagattgtaactccttgtcagggcacctactccgggctgcgcgccgaccattgcagacctacgcttcgctacggttgcaaacggtctctctaagccctcctcgtttttacactgccgcccggtctctagtacggtgctgatgtacgatcagctctgaatctacaagtgtttataggatttactccttggccacgcttgatgcctgggactcccaggctggtgctgcgggctgcgtcgtgccaccgcttagtcgaaatggtggtgcagccacttggacgcgcgcttgatcgtcggtgagagcatgatcgggaacggagcgacgtcggggaagcttgaactggacgctctccgcgttgcccacgagaaagactcgctcgagtcggcgtcgttgaagcagcagtcgttgtactcgcagccgcaggtgcagcggaagcagctcgtgaacgcaccgacgcactcgcagcagccccagtcgccgtcacagcagccgcagtcgcagcaatcgcagtcgcatccgctgcagtccagcttgcagttgcagtcgcacattgcgagaggctcacgcggcgcagctcagatgagaaatggctccacctagcaggagttctcagtcggttgggctaactcggtggtcgtaacgtttcttttccttttggcgctgagatatgagggcgaaagatggagcatgccagggctggattgcctgcaaaaagctcaacatgatacacacgaagtatttatttcgttgttgcatgtgatgggaatcgcgcgttggcttgtatgcccctataatagtttaccggtgcatccgagttacgatcgaggtggagatagcgagactgcgactggttggatctctgaaatggtcgcgtgggttgcagaatacatgtatcgcgtcgcgggaggtgaggcagtcgtgccggttaaagtgctgcgacagcaacctctgtcgccgaagcagcagtcgcagcaatgacagcaagcaatcagccagtcgcagcacgtgcagtcgcaatcgcagccacagcagtcacagtcgcagcactcgaagttgcagtcgtcacacatgagcgaagcgatttttcaaatagactggagtcttgcggtgttggaggctcgatcaattatgcgggcgagcggcagcggcgtaggtgctgtcgtagggatttccaagtcggatgtcgggtgatgcgctcattaccgcagccccccccccccccttgtgccagatcaccacagccgacaagctcatacactgaaatagcaggcaacacatgaatgcaaacttgcaaccggcatagctttgttcatcgtgtaggcatttgggcctgggatacagactgtagttaggtgtttcggtctgcaggccttgcatcggcagcgcgtcgggtgtgtacgatctttcagagcgcttgctgactcggcgggtgcaagctagcgtaagaagggatctctgggatgatcatgcggggcacaggattttggggcacagcaggagtcgcgcttgtgctgtcggctcggctgtagtcacagttgcaggaattgcagttgcagttgcacgcgctgaagcaacagttgaagacgtcggcgatcccgtcgagcagggcgcactcgcagcatccacagtcccagcacccgcagtcacagcagtcgaggttgcagtcgcagtcgcacattactattagtatccgatattgaatagaggctggcaagttcggaactggtcgctatggtcctcgtaccggatgggtacagcttatgaacgaacctcatcggattcttgaaatgcgtggtctgtacttctgtttagtttaggttggggcaacttgcctgtggcaggtgggtacgactggatcgttggtgtcgagcctagtgaactcagtcaaaatacgcgggcggcttgtcacgaattggagaaatcacgactgcgaacggaatgatctcaggaataccgccggtactggtattgggaggattctgggctgtggtgctcgtcgcgcggctgcagctccagcccccggtactgctgctgcagctgctggcacagcagtcgcccacgcagtcgcagcaatccccgcagcatttcagcatcagacaaccaggtgaattgcagcagctacagtcgaagcagtcgcagtcacagcagtcgcaatcgcagtcgcagccagcgtcacattcaccgtcgcacatcttccgtcttctgtaagctggtcttgttaacttgtaggcttgtagagatttgagctgccgtcgcgaaggaagcactccatgtgcgggggctccaggatggatttccggggcgtggattttgccgctcgttggaaacttcctcctcatgggtgcatgttgcaattactgatccatcagaacaacctttccactgctgctggccttgctgggatcactcatcacaaactttgatcttttcgagctgagctttcagccacgtgctcgtcgagcagtgctcgaccacctttgcgctactgccgtcgtggacgtcacagcagtccgcagtgcccgactgagctgtagttccataccgttggcagctacacgtatccgacaagttgtgagtgctcctgtgtttatcgtttggagctggtgcggcacattccgcaaaaactaagcaggaaaatttcgtccacacgcagtgcgtagctgcgcagagagcgaatccttgcggaaacccctacaacaccacgttgtataatctcctttcgcgttcccagtgcccgttatcacgaattcaaacgttgaagttgccctggcgtcgcggaaagcagctgggtctcgagctacgatctcgccttgcctccttgaagcggggcgggcgcaagcggcgtcccgaaggtgcagcgatcgatcgtgggggcgctgcagcagcagcaacgagcttactaatgcctcgcttggcggctctgtggactcggatgcggaagaagcgtcgccaacgtgtccacgtcgcttgttgtagggctgggcatgctgccgctttggcacagctcgcacgacgctcggcatgagtaacacgatcgacctgaggcttatcggtagactggagcaactcgtccgagccccagcagctggcggcgctagattccttcgcgttgggctttgcagggcgttggaacttccagcgcccgcgcgtgacaaaaaccccgctcgctgccaacacctacgaggtgacgagaccgtcgggcgtcgtcgaggctcgagaccgagggagggacccgccacgcaatctgcagtcgcgcgctaacatttcccgacccttgggtgactgcaatgggtctcgtgggagatcggaaaaccggtgggtgtgacgacaccgcctaacacgaccaagtgtcgtccagatcggggagcgcctctgtcaacaacgttagacgcttgtcaggcttgcgtgcgtgcgtccaacttggcgttgacgggcgcgccaagtcgcgagcgtcgtgcagagcacacgcgtcgagcacacgcgtagcgcgataggctatcgcagataggcgacggcgccacagcgacctgccagcctatcgagcatgcagcgagtcttactataataactcgtgttcgagcgccgttgcaagcgcagcagcaggtgctgcggaacccctggagtgaccatgatggtcgaggtcggctcgtacatcttgagctgcatcatgcatacacagccgcccgcgactgcacaggattgcaaatgtagtgtgaatgtagaggtacttcgcgaaaagtgtatgtcggtggccgatgaagccgcactggtgacgaacgaccacggcttgggaaaatagggggtataacgcgttgccatatgtattacatgtattgttctcgggcgcgggaaatccggtgtcgttggtagtttctcttggcctccttactccggctgcagcgctggcaaaagaaaggaggttccgctcgttctgcccgggacgagttgacagaggtcataattgtcgaggcagccagcgaggttgttgatgcgcccgctgccatcgagaacaaggccgaaaactcaactcaagtttgcattcctttttgtcctggttggatttttgtacaaattgtagaatgcgacaggaagttgaagttacatacgaataacaagtgcacacacgtcacagaccggcatgtgacagaaactgttggacacttccagcacaagtcaaggttctcctctctccagtgcagttgtccttgtccacggcgtcgggcggtcattactgaatcgaccttgtgcagcgaagaagaaaacaccaggagcaagcagacaagtgcgagataaagcacagcaagcacccacagcgaatgtgcctcctgtttccgcttggcgacgaactgtgtagctgtctagcaggtgtcgtgctgcctcgccagcgccgcccaggcaccgctatcggcgcgagtgctactcgcccagacgcgtgtacgtccagccggtcgtcgtgaaggagtactacccgcctccacctccgcagcagcagcagcaaggatacccctacgcaaggcctgtaggcaaggcatgatccagtgggggcaaagtggattaggcagcgcgaaatactcgacagctaacgatagagctgtatgttaggacagcagcttccttggagatatttttttgatataatataggtataaagacaatgatgtgttatttggtgttttgttgcatcgctgtgctgctaacggcaaaacactcacatgtgctagattgcgttcccgcaccgtgggtggcgagtatacgtggatctacagccttgctggcggatgaatttccggggtgggccgcgcgagacggcaactggtgcaacgtagactacgttggtcttcggtgtctgtcggcggcgccttccgtcctcccgagattggcactcgtttggtagcacactgcagagcgacactttgttctgcaaacatgaacgctgttttatcgaagacgaattgcttatagtcgtgcgtctcctgctcgtttgtacaagtaccctaaaatacagacgttcgaagaaactcggagctatgaacgttggactcggggaactgtggacacggctgcatcgattcttgattcgatatatcagtgattaattctgtaagcgagctccgcgagcatcggtggctgttcacttcctcatttcccccgcagcgaacagcgaacaaaccagtgaaatgtgcctggacgacatcctctgctgcgcgtgtggtgcttactgcaccgcatgctgcattcgcgcaaccgaccaatctcgggagcgccgccgacagacaccgaagaccaacgtagtctacgttgcaccagttgccgtctcgcgcggcccaccccggaaattcatccgccagcaaggctgtagatccacgtatactcgccacccacggtgcgggaacgcaatctagcacatgtgagtgttttgccgttagcagcacagcgatgcaacaaaacaccaaataacacatcattgtctttatacctatattatatcaaaaaaatatctccaaggaagctgctgtcctaacatacagctctatcgttagctgtcgagtatttcgcgctgcctaatccactttgcccccactggatcatgccttgcctacaggccttgcgtaggggtatccttgctgctgctgctgcggaggtggaggcgggtagtactccttcacgacgaccggctggacgtacacgcgtctgggcgagtagcactcgcgccgatagcggtgcctgggcggcgctggcgaggcagcacgacacgcatgccgcacctgctagacagctacacagttcgtcgccaagcggaaacaggaggcacattcgctgtgggtgcttgctgtgctttatctcgcacttgtctgcttgctcctggtgttttcttcttcgctgcacaaggtcgattcagtaatgaccgcccgacgccgtggacaaggacaactgcactggagagaggagaaccttgacttgtgctggaagtgtccaacagtttctgtcacatgccggtctgtgacgtgtgtgcacttgttattcgtatgtaacttcaacttcctgtcgcattctacaatttgtacaaaaatccaaccaggacaaaaaggaatgcaaacttgagttgagttttcggccttgttctcgatggcagcgggcgcatcaacaacctcgctggctgcctcgacaattatgacctctgtcaactcgtcccgggcagaacgagcggaacctcctttcttttgccagcgctgcagccggagtaaggaggccaagagaaactaccaacgacaccggatttcccgcgcccgagaacaatacatgtaatacatatggcaacgcgttataccccctattttcccaagccgtggtcgttcgtcaccagtgcggcttcatcggccaccgacatacacttttcgcgaagtacctctacattcacactacatttgcaatcctgtgcagtcgcgggcggctgtgtatgcatgatgcagctcaagatgtacgagccgacctcgaccatcatggtcactccaggggttccgcagcacctgctgctgcgcttgcaacggcgctcgaacacgagttattatagtaagactcgctgcatgctcgataggctggcaggtcgctgtggcgccgtcgcctatctgcgatagcctatcgcgctacgcgtgtgctcgacgcgtgtgctctgcacgacgctcgcgacttggcgcgcccgtcaacgccaagttggacgcacgcacgcaagcctgacaagcgtctaacgttgttgacagaggcgctccccgatctggacgacacttggtcgtgttaggcggtgtcgtcacacccaccggttttccgatctcccacgagacccattgcagtcacccaagggtcgggaaatgttagcgcgcgactgcagattgcgtggcgggtccctccctcggtctcgagcctcgacgacgcccgacggtctcgtcacctcgtaggtgttggcagcgagcggggtttttgtcacgcgcgggcgctggaagttccaacgccctgcaaagcccaacgcgaaggaatctagcgccgccagctgctggggctcggacgagttgctccagtctaccgataagcctcaggtcgatcgtgttactcatgccgagcgtcgtgcgagctgtgccaaagcggcagcatgcccagccctacaacaagcgacgtggacacgttggcgacgcttcttccgcatccgagtccacagagccgccaagcgaggcattagtaagctcgttgctgctgctgcagcgcccccacgatcgatcgctgcaccttcgggacgccgcgcgtagccatcgccgccgcttgcgcccgccccgcttcaaggaggcaaggcgagatcgcagctcgagacccagctgctttccgcgacgccgcggcaccgacagacgtccaggatctcttggtcgccgccgccgttggacgcactcacgcctcatcgtcggcgcgcgattggcaaagcggccgacccacagcggtcagcgccggtcagagcggcgagattgcttatgacatgggcgtcagcgcatcaacgtctgaactcctgggcgaaaatatctaaactttgaaactttttggaagcgcaaaattgcagcaaaagccggtgggtcgacgagcaagaggactcaactggagatacgtgtgcagcacaagtgcacgcgctcgaaggcaagacatgccttgccgtgccgtcggcatcgtccgcaaagcgccaggctcgcgtgttgaaaaaggcaacttgctcgtattcaggattgccgttataaaatcaaataaaacctatccccacccgttttcaaccaatgaacggtcaaaggacattttcaaaaataaccaccctgactcaatcggcatgtggatttatagagttcggcgccttccacttcgcttaaacagattaacacgacgagcagcggactttcaactcgcccgacacaagcgccgcaacggcgtcagtacatatcacctccaatcgcggcacctggtcgcctgcagcgtgatgaccaaaacgcctgctgttctaatgcttttgcgcgcggcaagcagtggtttcacggccacagacccctacccacacccatctggccacgctgaatgtattttttcttgcctcggactggggaacgccttccctccactttgcaagtcgtcgccatactgaacgcaagtggcgcgccgccccaaatcgactaggagcggcaaagcaggaagagacgagcccccgccagcgcctccctccccttgtgcccgggcgcggacggctcacgcagagactcactccccgctgtgcgcgcgccaacgcgatcgtctccgagccgcgcgaagcccgcgggacgcagtttgtggctttgccgttgctgaccggacgacgaccaacacaaccgcagagaagacgccacactttcccaccgagggcgagcgaagggaagcaagaagcgaaacctcaagtgcacactttgccacttgcacattagccatgccgcaggtaagttaggttaacacctcgtgctttccgttctttgccgtgttgccgtggaaattttctcgcggacagggggtaattcataacgcaatgtttatctctgcctgtagactctggtgttcgcggagcaagtgcccacgtacgtgtaccagaacgtcaactttcaggccaccgtcaagctcgtggacgagcacaaggccaaagtcacggggtaagttcacgttgggtgtcagcgaccgctacgccactctcgtcccccctctctaactggtgtctcttaccgtctttaaacgtctctctaaccagcgtccgtaagccgctgcaagtgtccctccgcttccatgacacgtacgacctcgtggaggaccaggacgcggtgctgcgcctggcctcggaggcgcgcatcgaccccaacacgggcctcgcgctgctgtccatgagcctgcacacgctcacggccacgtgcgacggccgcaacttctgcctcgaggtgcgtagcgccgacgccgacatcgagtcggtcttctcggcgcccgtgaacgtggtcaaggagaagctgcaggtcgtgacgcagccgcccgacgtctggttcaaggacgagggcggccgcgagaagtgcatgaccgtcgcgctcacgctcgtgcccgcgcccggcgcgtacctcgaggaccgcatcgtgccgctggacgtgcggctgctctacgagtcgggcaacacggtgctgaaccagagcattctgcggctcttccccgacatgcgccccaacatgacgcacggccgcgtcaccatctcgttccgcatcgacgacgtgtccaagaaccaccaaggccagtcgttcatgctcgagatcggccccgagcagcaggacggcagctccatgttccaggacatcgcccccacgcgcacgtcggtcatcgccatccgctccaagcgcaacaagcgcaaactcaacgcgcaggcggcggcggcagcggcggcagcggtctcaggcgtctacgggatgcgcgcgtctccgcgcagcgttgcgggcaccccgcgcaccccgtacatgaacatgggcggcgcggcgcagaactcgccccaggggatgaacggagccggcatgatgattgagccgcacccgcagcgcgcgcgcaagtacatggccacgagcagtggcatgggttacggcatgatgcagcagcaagctcagcagccgccgcagcagcccatgtcgtccatgtcctggagcagccacttgatgcagcccaacaccagtgcggtgtctcctatgcagccgcagacgcctcagaaccagcaggcttctgtccagaccccaggcgcgggagctgccaacagccctggcgcagtggagtgggcactcggaggcttcgagattcacccggacggctccatgaatacggcacgaccgatctaccgctgcccgcagtgtcgtcgcctgaatgacgtggacatgctggcggcgggccctgcgctctcacacagcccacagtgcgtgttcgctcccaacggtggcaacggcaacatgatgtaccgttctcagatggaaggaacgcccatgaaccagcagcagcagatgcagcaacagcagcagcaacagcagcagcaacagcagcagcaacagcagcgtgggtacgcagcgtaccagcagatggctgagcagcagagtgcggctatgagcatgggcatgagtgcgcagcagactaccagtaccagcagctacggcagtagccctgtggtcgactcgtcgtcgctcaacgtacagcagaacacggtcaacatcacctccaagccggaggatgcatcacccaaaacgatggcagcgctcgcgacgtcgtctacgctgcggccgtccatgaccatctccccgtacatgaacaaggtcaccacggaaggcaacgtcccgggcaacagcgggcaagagcagggatccagcggcaatttgttcgagagcaacgcgttccacaaccaaatggagatgatgggcaacaacagcacggagaagttgttcatgaacaagagcactgccgttgaggacgacccggcgctcgaccctcagcagcagccccagaactaccaggagtcgggctcgtccttcaacggcgtcatcgggacttctctcttcaatgagatgaccagcatgggcattaatcttgatcagtacgacaagggcgactcccaactcctgggcgagttcaacggcctagcggctggagccgctcaggcccctaatgacgaagaccaagtcttctacattctggctcggatgtacacggacgcaagggagcagaagcttggattgccggccttcgaccagttccaacgcatggtacgtcaagcgttgaagcttatgtatgcacttggtcgtgatgtctcggactctaattgtgatgtttctctcttgcttgaattgctgcagcttggattctacagcgaagcccaagacgacgtccagacgcaggtggtgttccacccgctgcgggacgtgtgcttgtccgacgaagagcgccagaagatcacgtcccagttcgtggacgagctgagccgcgactcgcaggcggtgcattcgctacccaagtaccaacacaacctcattatgctgcgcgaggacgcgctcatgttctactggagccagtcgctcgtatgaggcggtgccgagtgtgatagagggatagagcctcggcgtaacagaccgcaggcaagcgttgtgttttaagagccaatgtgccagatactagttgagtgcgtaccagtcagtgggtagtaaacgtgagcgtccagttgtataaagtgccgtgcagatgcatgtagtttgattcagagagaaagaaagaaagaatcgtgtgaagagtttcatcggaaaatctaatcgacacaataattccacacgccaagaaaatctcgaaaccagtctctaaacccgcttctctctatctatctcagttgccttgttgcctccatttcaactccgcgcacttccaggcggtagatgaccacgcgtccgtagaagtcggtgctgcgctggaacgtgagcgcgatggcctccacttggctcagctcacacgggaactcctgcaggtcgttcgcgtcctccgggtcgacgtccacgtccacgagttcccactgcgccccggatgctcctccgcccgctctcctcacgtggacctgcacgtcctgacccacgaacccgccctggaacatgacgcagagggcggagacgtccaccgcgcggtggaacagcacttgcacctgctgcggactgccctgcgccgagttccagcagctcgacaggtcggtcgacagcatgttcgcagcgccgtagagctgcttgttgcggtccagcgtggacgacgcccggcacgtcgtgcgcgggtcgtcactcagcgccaccattgtagccatttgttgcacctcgaccgtttcacgttttgcgtgtcaatcaaaaatggacctatgatagagcctaaacctgggattaatcgttatgtggtgtgtcaaaacacgaattttgtgtgccccacacgttcgagacttttctcgaatccgagccagccgcgtgcagtcaaaaagcttccgctaattaattagcacttacgaggaagagatcatgtcggagaccaaggctctgtgggcgcccgtcaagtgggcgcagcgcaaggaggcgctgtacgtgaccgtggacctgccggacgtcaaggacgagaaggtctcgctcaccagcaagcagctcactttcaagtgcgtgccagccaacaaggacacgatcccttagattctatctgtggatttttacctaataaatccgctttttgcattgttttaggggcacgagcaacgggcagctgtacgaggtgacgctggacctgttcaaggaggtggacgtggagcacaaggacagcatctgggccaagacggaccgcaacctgcacttccacatcgtcaagaagaaccaggacgaggagttctggccgcgtctgctggccgacaagcacctggagaagaccaacgtcaaggtggactggagcaagttcgtggacgaggacgaggacgaggagcaggagggcttcgacatgagcgcgctcaacggcggcggcggcttcgacatcaaccagatgatggcggcgcagaacgcggccggcatgatggacgacgacgccagcgacagcgacgacgaggacatgcccgacctcgaccccaacgaccagtaagtacgtacgtaaatgcaggcccgacgacccctgaaggggtgataatgagtgcgcggcgaggacgatgggaatatactgctcgcagttgcggctgcgcttggttgtgtcgtgcgatttggtcggtgcggatgggaaggaatggctacggtgggcgtaaattactcagattaggtagttcaagatgtgtggtttgatggagttgcggacgctacactagggacggagagaacgtgaagcacgagcagagccgaagtggcagacggctcacgcggccaggcagaacatgcccttgacctcggggtgtttccggaagcgcacgttggagaagaggatcttgcgtaccgaggacttccacactggagacttgcgttgatcgctgacccaagcagaattgcaccaccgtgcataacaaggtaggcgttagtcagatccgcttggtcttcaactaacagcaaaaggatcagcgaaaatacctctccagcttccagttaagttggctctcgtactcggcctcgacgaactcgcagatctccttgaaggagccctagctcacaagccaaatgcaacgaatctcgagtgagcgcgaccatcaaaatagcaaggttttatccaaggcacgcactttgcctccaggcagaacggtcaaagcgtgcgcgatcatatctccatacgtcacgctcgcaacaggcttacgatactctgagcgtcaaataaaccaagctgttagacactgcaaccacgttgtaaactatggtgaaccacgtacggttttccggaatgtctgcggagtcgttctcttggcacgctgggcagtaccaagtctccggcggttcttccagggggtccaagcccacgcagcccatgtggtaccaattcgatcgatccaggcatttcttgttgtcgcacgcgatcatgttgccgaagctcgctcctttgcacgtgcagtagagtcttccttttcgcttcttcttcttctgcatcatttcagcgtcgccgctatcgactcgtccgcggccattcgtgcctcgagacttcttgaccgggttcgctggccgccgcttcttgaccacaaacggacggaactcgccgcctagccccgcattgccatcttggccaaagtcgaaaaggttgtcaatgtcttcctcggccaacacagcctccatacgcccaccattgctgattgtcacctgtcggctctggttctccttgtcaccgtcatcgaagtcgtatttcttgcgcttcaaccgctgagctggctgcgctcgcaacagctccgccgcttcgactgtatcgttagaccccgtgagctgcaaattaaaaacccgaaatgagcctgaaacctcttgcaagcaatcgccaataggtataacagtttggcacgtacataagtcacgaaagacttgatgctggagccttcctcagtttttttgcactcctggttgaagtgcctaagtagcagcaacattttgtcataaaaaacccggcgacattaacgcacatggttagcgcaattgcaacttttaaagaaatttgcagtggcaatggcaaaagcaactcgaagacaacgcacctggccactgtaactgccagttgctcgcgtgagctgccaggcacctccgggatgccgtggaacgccaaatacttgcgcagcgcattgggctggagcaattacgcagtcaaacacacagcaaaccgttgcaaaagttgcagcaacccggttagcaccttcatctaacgcattgcacacagttttccacccgaacagcggcgcaatggcacaacttgaagcgtctcaaccctggagagacgttccacatgcaaccgcgtacccgcaatcgcgtgaaatccaccgccatgttgatcggatattgactgtgctcccctggcaacacgcacggcgacgaagcgctggagctgctggaacttgcgctcgcggcaggcgccggcgcgccctgctgcgggtctgccatgttgatagattcttgcaacttagtgcagttcttttttgtgccgaccgccgttttggccaatccgagcgcgagtacgcacgtcacttcgcatgcatgtcgaagtccctccagcaagaacttcctgcacatcgatctaacccggatggacgaagcaatgcaacgcagtagtttaggctagtgttaaccggcaactataagcattgtttggagctgagttgatggggcgcgccaagagagtatcccttcgcgatatcgagtcgagccgagttgagtcaggcggattgacaagacctctcaacttcaacctcatcaaaagcttttggtgcatcactttgcagcgaaacatgaacatatactaactggcaagaaattgcagcgcgcgggcgggtgtggttcatacctaacgatctgtgttcaacgacatagcctacttgccttccttccttccccttcaattaccttaatccacgccatgcgtctgtcaatactctgtgtagtacgtggtagcctcctcaaaactcgaagctctccatgggggtcggtttcttcacgggcgcccgccgcaccacctcgatctcgcgcggggccacttccacctctcgcggggcctcgcgcacgttcaaggccgccatcttggcgcgctgctgctccatctctacctgctgctggcgccactcggcgtcacgctcgcgctgctcctgcttgagcgcggcctcgcggcgccgctggtgctcctgctgctgcttctggatcatctcacgcttcgcgtcgccgaccagagacgagcgcggcgcggtggccggagcgtgagcagacgcgtccaagctgccagactcgatcaggggcgaggagggcgaggcttccggctcgtagtcgctgtcgtccgactcgtcgtccacgctgaagtgcgagttcatctgttgagtcatgcggaacgcgagatcctcctgctcctgctgcatcctgagcctgagcgccttctcgcgctcggcacgctcgcgcgcgtgctcctcgcgtttctgacgccgctgcagctccagcagatcctcgccctgctgcggcttgagcttctcttgcacggccagctcgtgcgcgagccgcgagttccggatcgcctcctgttcctgctcttgctggagccgtgcggcttcctcggcctcccgcgcgcgctgcagctccatggcctgctgcatctcaagctccttctgcctctgcatctcgcgctctctctgcgcacgcttctcctgctcctcctggagctgcagctcctcggccgcggcgagcgcggcctcatgcgccgcctcctcttgttgcctggccagctcctcctcctgctctcgctgctgctgggccgccaactgcctgcgcatctcggcgtcctgctctgcctggcggtgctgctcttcctcctgacggcggatctgctgctcgtacctgatctcctcctggcgctgctgcttctcgactctgcgctgctcctcgagctgctgctgcttcatgctctccgcctgggcgatctgcagctcgtgctcctccgctgagggccgcacgtccgcgcccacgctgtggcgctggttgatgccgcggcgcggcaccgagaagttctggaagtcgcggatgctcgggttgctgttgacgctggggatggaggcggcggccgcgcggccgtcgtgggcgatgttgttgtcggaggcgggcgcgggcatggacgcgcgctgcatgggctggcccgagttgatgcggaaggccagcacgagcttgtccacccagtcgttcatctccatctccgtgccggcggccacgagcaggcgccgctcaggcgcgttgatggcgatgcgccagatggtggaggcgctgctgccggtcttcatgctgtcggcgggcatgacctccagcacgccctcgtcgcagccctgcaggctcagctcgcccttgagctcgccgtcctcgaacgtgaagtactgcaggcgcgcgggcgtcagcacgaagtagcgcggcttccagttcttgcggccgaacgggcccgtgcccgaacccttcttgaacagcacgcccgtgcgcaggatctggccgtcgctcatggccgtggtggggaggtagtgagtgtgtgcgtgtgtgtgactgggactgacacgagtgatcgatggagtcgaatcccaaagtggctgaagggaagaaaacaaaagagcggatgcgctcggctaagtgcgatatacgcacggtatactggagccaagtcaagctcgatttgattagtgagaggcggcgccagatggcatggaaaagctatgtttttggggcgccggggctggttgcttggtggtcgttgtgctgtgctgttggttgcgccgtgcgtgttcgtacgtgcagtaatgaatgcgtgagggacattaagccatagggcggaaattttagcccagctcagctggattcggcccgggattgtcggctggtcccaatggacacggagcaacgattgtactatgaattttcagggttttctgaagtttgacgcggtggaatcgcccgacaagaccatgctcttttgcgtcgatggcctctgcgacgttctacggggatgcctgcggtatcatccacgccgcgccgcgagcgagcggggggctgccgctaccggctagccgggcgaagaaaatccaatctaacgtcactttgctgaggaatttccataaatcagtgattttcactgagatttgacaaaacctgaattcactgatgcagcatcagtagtatcgtactagcgcatccatacaatttgcaagtcaaatgtagacctatagtaatactagaaatagtacatgtagatagtattttatctactacaactaatactacataatatagtatcactgtcgatgttattagtacatactccggttgctacggtacagtagacaggcgaccccaaccagtggcacttacgtgatttctgaactatgcttgaagcgcatacccccttccttcctagtttttggttttcatgcatcgatagtagcttcagatgaaatatgttatttttaatagaccaacgttttgtgaagccaagcacccagccctataaaagtgataaagtagcaatgaggacagccttgcggaatgccaaccgcttcaacctccgctacaggtcctccgtccacgggtccacggatcctgcaatctcaggaatgaaccgcgttcgagttgagcgagattgtgttgtgcgagttaagtttgggtccgcagaagatgataatggtcgacgggcgaaaggctcataaacatcctggtaggctcttagtcaatgtagcaggagatgcgttgtaatggaaacgcaaatttacataccacagatactgtaggtaacaggtaatccgtagatttcagagcttcttcgtgcaacacgcgcgactttgtatctcgttgaattgcgatagcgatagtgactgcgccgccgcggtgaagatgctcacactaagttctatagctatcccagcctatgcatagctctcgtcttcatttgatcggctacaaataatcggatgtaggttgcactagcagctttactcctaccccagaataaatgtagtatgtaaatagagacatcttaccaaaaaaataaacgcaggtcgtgtaaaagtctcgttgaggatgatattatattgtgctgcgatatagtaactactagtagtgtattggcaacttataaagtggcggattcccacaacgtagaaagacaaagtacttccgcacccacctgcaaacattgtgtgcgtcacaaggttttcggttcatgttcttagtttaatatgtcggatcccatcggtactcagttctttcaagtctcttaccgcggcgactctgctcggatgtgaaggggggaaacatgtcgacgcatagttaagtaggctacggccttcgtcgtggtgtctgcttccttcacatcgactggggccttgcccaacgagagcctcgcggtacacttcgaaataatatagtaatcgaaagaagcgattaaatactactgtagtattactatttaccaaatcactgagtagtttcaagctatcacaatcattttgtcaaatctcagtgaaaatcactgatttatggaaattcctccactttgctcgcttatcaagccctcgtttgtggcgagtgctcggtttaacaagcggcaggtgtctatccaggtcttagtaagctctctctacgtcggccctctctatctacttactagcgccactcggtgagccgcttcatggcgccgcacttgttgcaggcggacgcgtgcttggagttcatgtgaccgcagccagccttgctgcactcccacttgtccgacgtcgtgatggccgtcgccgacacaggagcgggcaaaccgcacgcgtgcgctgtacccacgggttccttcgccgcctcccgcttctgcagctgctcgaagaaactcctcgcgtctaccggcgccttctcctgctgctgctgctgcttctcgtctacctgttcgagcttcgttgttgctggagatccttcgccctccgctccttccagttgctcctttttgtccttcttgtgcttgtgcttcttgtggcgctttttctcctccttcttggctctcttcaagtgcttcttgtgcctcttgaggcgcctctcctcctcgtctagtgagcgagaggacccgctgctgcggctccgggagcgactgcgcctcctgctctcacgccgggggtcgacggggctcctactgcggctcctgctgcgtctgctcggcctccagccatggctgcggctcctgcttcggctcggagagcggcggcgacggtcgcgcggcagactgcggcttcgacttcggcccattggaaactgcaccggcactgtcccgactcaagtgccccaaaccccaatggctccactcgtgaaatcgatgcatcgctcgaagtgtgcgatagcgttgcgaggcgcctggtgcttggacggagagcgaagcaacttgaaccgtagcttctcgtaggctacaggaaactcgcacttgtagcgcagcaagcaatggccagatgcatcccaggaatgacaatcgtatgaattgctacgctgtacagtattaaaagccgcatagcttcagagcctacaaaccaaaggacaaaggcaacatcaaccgtcaaaacactgcactgcacgtacagtccaaaagtgtcggccgtcttttgatccaatacgtagtatccatagtatccatatagttagccctatcgctcagccacttccactcggcgctcttgcgtgaggcggtccatgtagtcatcgaagctaggtttaaagccttgccaacgcttttgggggacacgcccgcaacctttcagagcttgctgaactggcgggtcttgttgtctgcgggttgcgtctctgggcctcgtcacagatacagccctcctgctttcaaagttgctttttttaaaagcttacttagtaaagcttttaaaaacttggcctcaagcttgatgctttcactgtaaccggctacggtatacggcccaggccctggaccccgtatccaattgctgtgaaggcgaatggctaccaaagttcaaactccatcttcagactgaagttcagctcaaccaacgccttcaacgtcaccaagcccgttagacccaacacggcgagcacttgtgcgatagagttacatcccccataaaaaataaccgcgcttacgggttgtggagggcgttcgcataaccttaccgtgcgcgccgtggtgaccaagatgaatgctgttcagcgagccgagggagcactcggtcgcgacatgttcgcatctcgcgctccccatctagtcagcacccaagcgacacggccaccgccgattggctggtggcggtttgttaaagaccgatgcgtgccagaacgtgcccataatgggaaaatatctgcctgaaagtccacagtaaaatgacaatatcctccggtttcgacaatacatttatttttcgcgatcaagctctgtcaaatgttgtcaagccgcgtcgacgaccgttacaaaacttcagatttggctggctgcgctgtgacctgtgacccgcttctcctcctgggcagcggctcattcccgcttcggccaccaaccgctcggatccttcctcgctcagccacccgcacacagatcgatcaccatgggcaagggacagcgcgcgcgtaaggccgcggccgacgccatgctggccgccgccatggcgcagagcaagccgtccgtgctggagcaggagtaccacgcgccgtcgtcgctgcaggtcgtggcgcccaaggccccgtcgggtctgggcgtggtcgtgccgcccgtgcacaagaagccgtcgccgccgccctccgagacgtccgcgtcctcgtcggacgacagcgacgagttccgcgagctcgcgtccgaggagcagcgcgaggcgctcaaggcgctcgaggacgcggaggcagccaaggcgcagctgagccccatcctgtcgcgcctcgtggctgccttctcctccaagggcgagcgcaacgccgccgccgctgacattgtggcggccgtggaggtcctgggcgtggccagccccgctgccatccacctgctcgacgagatcaagaagttcctcgtggccaagcccaccaccgcccgcgaaggcgcgctgctggccgtttccgctctgctcaagaacgagcagctgtcgtccgtgatggagcccgtcgtggtggagcagctcatcaccatcatgcagcgctacgccgactcggagcacgtcgtgaagaacgtcgcggcctcgctggccaagacgatcgcgcagaaggcgaacccgctcgcgatccacaccgtgctcaagcagatttacaaggcgctggagctgcgccagtggcagagcaaggtcgccgcgctcaacctgctgaaggagcttagcgaggctgccagcgaggaggtgtctggctggctgccggagatcatgccgatcgtgaccgagtacgtttgggacacgaagaagcaggtacaggccgcctccattgaggcgctgatcgctgtctgttccaagatcaacaacgacgacgtcgtgccgctcgtgcccactctggtgggtgtcatcgctcgccccgaggagaccatgaaggccattgacagcctgctggccaccacttttgtcgccaacgtggacgcgccgacgctgtctctgattgcgccgctgctgcacaaggccctccgcgacacgagcatccacagctcgtcgctgaagcgcaaggcgtccaagattattgacagcatgtgtcgccttgtggtgcgtccgtcggacgtgatgcagttcgtgccgctgctgctcccgcagcttgagacggccattgaccgtttgatcgacgaggaggtcgttgaggccgccaaggaagctcgcgctcacctggtgcacgccgctggtgatggcgaggcgatggaggaggaccccattgagatccgtaacaagctggagaacgacatccacactgcgttcaccgacacgctggaccgcccgacgcactctggcctgaacgacttcacccttgcgtatgtctcggacgtgtgcacggagctggccacccagaaccgcggctcggagtggcgcgagatcgtcatggcttacctgcagccgcacatgcaccacaaggacgcggagcacatctgcgaagctctgcgcgccgccggtggcggcctgggcgaggagcgcgagaagtccacggaccccaacgacgtgtgcgacctggacttctccctcgcgtacggtggcaagattcttctgcgtaatgcccgccttcgcttgactcgcggccaccgttatggtctgatcggccagaacggtgtgggtaagaccacgctcatgcgcaacctggccaatggtgccattgagggcctcccggagaccctgcgctcggtgtacgtgcagcacgaagacattgtcgagagccagggaagtctgctggagtccatgtgcaaggccccggagctgtcgcaccagacccgcgagactgtcgagaagactctggtggacattggtttcacacagaagatgctggatggcgagattgacgcgctgtccggtggttggcgcatgaagctggcgcttgctcgcgccatgctgtacaacgccgacgtgctgctgctggatgagccgacgaaccacctcgacgtgcatgccgtgcagtggctggtggactacttgaactcgctcgagacgatgacggtgctgctggtttcgcacgacaccgggttcctggacaacgtgtgcacggacatcttccactacgagtccaagaagctggtgctgtacccgatgacgctgtccaagttcgtggagatccacccggaggccaagcactactacgagctaaagtcgtctgacatggtgttcaacctgccggagcctggccgtctcgagggcatcaactcgatgacgcgccgtattctgacgctcgacaatgccacgtacacgtacccgggcgcgtccaagccgcagctgaacgacgtgtcggtgaagttgtgtctggcgtcgcgtgtggctgtgatcggtgtgaacggcgccggtaagtcgacgctgatcaagatgatcgtgcaggagacgtcgcccgacacgggcaccttctggaagcaccacgccgtccgtgtggcgtacgtggcgcagcactcgttccaccacgtggagaagcacctcgacagcagtccggtcgagtacttccagtggcgtttcggcggcgagaacggtgtcgaccgcgagctgagcgaccacgtgaacctcaagcagacggaggaggagaagaacctcgtgggcaagaagcagggccaggtcgagaagattgtgtcccgtaccaagggcaagcgcggcacgctcgagtacgagtgcaagctcgtgggcatgacggagcgccacaacaagcgctacacgctcgagcagctccaggagatgggcctgggcgctctggccgaggcggaggacatccgtcaggccacgctggccggcggcctggacctgcgcccgctcacgaccaaggagatccagcgtcacctggacgacttcgcgctgccggccgagttcggcacccacggcaagatccgcggtctctcgggcggccagaaggtgaagcttgtcatcgccgccgccatgtggaaccgtccgcacttgctggtgctggatgagccgacgaactacctggaccgcgcggcgctgggcgcgctggcggacggtatccgccagtacgcgggtggtgtcattatgatttctcacagtgaagagttctacaactcgctgtgcacggagaagtggctcgtggagtccggccgcctgacgatcatcggtgaggcccaggagaaggagtaccgcgccggcggaggccgcaaggtggtcgaggaggagcccgaggaggagaagaaggtgggcagcaacatcaacgcgtccatgaagcgcactaagctcacgaaccccaagacgctgcggccgctgagcaagcagcagatccgcaagctcagcaagctctgtaaggccgcgggtgtgtccttcgacgactacgtggacggcctcacgcgcgagagccccgagtggaagtggctgtaagtgatagacctaacttactattgaatcaatagacgaccgacgcttttgtacgtgcagctatgatggaaatcgcggggagagatggtcatctacattcctattgcgacgctaggaaatccagtggagtctatgcctaggcgaggtacttgaaaggaagggtggaaaaacacactactaatacattagtttgcgagctttatttttatcttgatttttgtatggtgtggctcttggcgataattgtgacgcggtgcaaaatacgttggtttgtataccaggctggtattaccagtccttttaaaaagttcaaaatcggcagcgctaacacatacactgtgctttagtaaataataccaagcacatatctaaatagcacgtcataactctaaaaattgaccgagaaacggcccaagatgtaccctggcgatactttatgacgcggagtgtatggtaaagcaaattgcataagggtattgtgaattccggccaaatttgccgaatcgggtcggtttggggtctgtccaaccgaccaatacaaacatcaagtcatttgccgaatcgccggccaacaaacatatggataaatatcgtgacggtgccgacacaatttttttacttgatttaagcataggcagactgaccgcaatgcatgtatattgaccaatgacatctagatatacccaatatcggccaatgagcttgattaggtgtagggtaaaacgatgccgacgtcgtgccgacgtataatgtaggcacgggggcgaaaatatgcagggcgtcaatacgagccaccagtctactgctcatcactcgaatatctgccctcttgccgacagaacactcggaaccagtatgagcctccaagacctcgcccccgccaactcccagcgcgctctacaaaccgcaatcaacgccttcggacgcttcgtcgcgacccaaggcgtctccatggacttcatcgctgcctctctcgcagatgataagagtggggctgtgtttgtgaagctcatggaccgctttggcgttcatctcgccttcgtcgaaggccgaggagggaagccgctggccaagaactcggtcatgagctactaccgccatgtaaagaactggctgctcgacacctacccgacccaccgagccaccatcgagaagaaactactcaagatgggacagacgctcgagcgccattgtctgaagcgcatcgaaggtggaatggtcaagaaggcgcctgcctgcaggaaggaagacctacgaattctcatggtcggactctactatgatgccaccagccccaaggactaccaagatgccgcgttactggcgctgatgtggtacgcgtttggccgcgcctcagacctggggttcgtggtgaagggaaacctgtctgtgagtgcggatggcgttgtgttcgtccggctcatccgcgtgaagacttcagacgagcagtgcatctctctctttcccgacaagaacagcttcatcacgtgccccctgcatgcgattgcgatggccctggtgatgcaggacgctccgtgcgcacagctgctggatcatccgcaccttgccgcaagcggcgacgagagtatgacagcccctgttgacgtgccactagctgagctcttgttgcctgtgagaacgacgacacgccaagtgagccgcctcagaaaaagcgtaaactgcctgaagaaaacatgaagatccacgcctacgtgaaccgcgttgtcaagacagcgtctgccgctcaagctaaagcggtgccaactgcaaacttgacgtctcactcgtttcgacgtggtggggctcagcatgcaaacggtgatccactgctcagtgctcagtggattttcgatcatggttcgtggaacatgacggctaccaacaaggctttcgcttacgtgttcaacacaaccagtgaagaccagaaagtagcacgtgttctcagcgggtgggactcgagcaaggagccaccggttccaaccctctcctggctcgactccgccagccggcagcaggcactgagcttgggaaatcttcttttccagccaagcgtgtgcacccaagaccccgagaagaagctcaacgcccgcgtcgctgaagttctgactgccgcgctgatccagcattttcccgaggtactcgagcgctacccgatgtgcccgtacgctacccggatgcgcgaatgcctgatggcgttgggtttaccaaaagctcaagttctcgcgtggagctctgaactacaggcgaaggtggcacaaaaggatctggaggaatctcaagacgacacggaggcattcacaagagaagaaaagctgatcaatcaccagaactgcatcatcggcgagctgatagccatgaatcgagccttgaccgagcgggtcacccaactggagagtcagcgcgaagttggtcagggtgactcctcgacaagtttgccggcaccggtggtggcagcacaatcgcattgcgaggattccgctactgtatcgaagtcgtgtggaagcaaggctctcccgaaaggcccagcggctatttggtttgagtggtacgcaaaaacactgcgtatgtgggacgtgtgtgcggatcggcagaaaaaatcagcgtacaagcacaccgtgaactgcatgaagctcttcttaccaaacggcttcgcgctggacccgtcggcccctgactacaccaaccaagttgttcgtaccggaattgaggccgaatccgggatgtacagatttctcgaagagcacggagtcaagagcaaacttggatcaggtgtactcaagcaactgcgcaagtttttccgggaaagcaagctcaacgctctagtagacgcgtaccgtgctcgcgttgctgtcgcaggcgtaacggacccagcgtccaaggaaacgcaagagctgtttacacggaagtagttgagttatagtttctaacgtggggctataataaatgttctgcaccgctacacattacacttcgataaatgtatagcgtacagcatgtagtgcgcgtttgactttcgtacgcaactgctggaacgccacagagcttcataatatcgatctactcttaatcagctcatgcatttgacaagatcttgcactgcagtcgaggcggtgtgctaccactctgaatctttactgtagccattttaatagtaaaaaataagagtgcttctgtcttaaaggatattttatgattacccagaggttgcagattaaacaacggttttgcgtaaaactaggattttattgttggtagttaatcggctcgaccgcgtaaacacagcccagatcagcaaagaagtggcgtaatccgtcttcggtacttggcttgtagacgagctcgtccgagtcgatgaagtagtgcttgttgcccaccgccgcgccagcgatgcagtgccaggtaccctcttcttggccaaagggcctaccgatgatcacaaggtgcctaaaactagacctaggaatcttcttgaaccacctttgcgaactgcagttgaacgtgttggtactgttcaggtaccgcagctgatagcccttggcgcgaagcgcttcatgcagtgcttgcatagaatacgccccgtacttctcatcgccatggggggctggcccttcttcctcgggtgcagccgcgttaagacgacgcacgattggcaccaaatcctcgacggttaaaaaacgtgggtttgcaccgcattgttgatcgagtacgatccatagagagaatatctctcggatgtaccgctctgattctcacacattggaccgcccctagtccgtctacccacaatggattgcatctctgttcgtggaaggtctagcaaatcgccggacgtgaagagagacgcgcaccaaaaaaaaaactccccactcttacttagcactgacgtgaaatcgctagcaaatcgccggcggggtgagcgcaaaagcaaaagtgagaaggactgcatcgctgcatcgaaggcgacgagcgctaaccaaccgtgtaaatttcaatgcttttaatacagtacagccagatggactctcgaaaaatgagaaatgtattgcgtttttgtatgttacgcagcgctaatgctgctgttttaatagccaacatgcaaacgcttaagttggtaatagcggcagaattacaggtgtcaggctgttactgcctgacacctgcaatccaggatttgctctggcactgctggagcagtggcgcatttgattgctaaccgcctgggccccatgcccgatgtgcatgatgtgtctgctttttttttagccaatcccagcttgtaggcactctgtcggccgatgtcggcaccgtcatggtatggttctgtgccgcccgatccgtgcttagtagagagtcaagggggcatagccgggcgaccatagtcaacccaagtgctttggcgattcgccggcggtttgccacggtcgattcaatccgccccgctcggaaaatttgagtagaactcacagtacatacaggcgttacgtgtttggctactcttcaagagtacgcccaatgagtcagcggcaatgacttatattgtgtcgaattgcactattgaaaacacaaaagggatcgatttatcgtagatcggcctcgttatgctcaaatccacgaggaaatcgatctcgagccctgatttggattgtcgtagctcgagttattagccggcctactaagtaaatagatcgatctgtccctttctttgacctcgttttattaaatcgacctcgacttaataataaatcgaggagggctccaagtcaaaacgacaaaaacgtttgcaaagcacaatacaaatttaggatgtaactgtgggcgttttctgaatgccgcctctaaagtatattctaagccagtaacactagtgtaatataggatacaaataacatacatttgagtgatgtatcgacgacacagataagttttaatgtgaaaggctcaagcaattggctcttaataaacctgcacttagtcataccaaacgctcaccagcgtctagcctgatccacgatgtctgtaacggggttacttgcaagggtaccctttgggtacgatacagagtacccccatagcctgtgagccagtcgtctgcatacaagtagggctgactatgctagataattagccatatatactaggaataggcgccgccgctgcagtacgctttccagacagttcatatttttaccaataagtatttttgacttgtttcgggggtcctcggataggatcctggttggactctttgagtcggaaacttttcctctgagcaaggcactattgcagccacgctgtaacgtcatatacaaaacatgtctgcgctggtaagttgagccctttactactcattcagaataccattcgctagcgtagatcatattttggcgtcagcacagtcctgcgttggttgaaggagtcggagcatgcctgctaggcgcaaggtgtccgctgcacctgttgagattattatttttgcaccaatgtctacaaaacgattcatctatgcttctacacaagacagctcttcaacgttactgggatagtgtttatagtgtattctattctacgttggctggggctgcagctaaggctgtcccacaaaagcgctcgagcatttatccggagaggtagtggttgcggagctgaggccttcacgatcaagatggatattcgatatcgcttgccgagcagtagtcttctcagaaatatatcaaagaatgagctatattttatgcaccggggcgcgaattcagcttgtggagcgctgtccatttttcgattctcttcgcggggacctttccgggttgattgaaaaaaactgacttcagatgcacgaactgcaggtatcaaacacgtgtatgtaaccgattcggtcgatctaccgctttactcacctttcgtgaggtagtaagattatgcttgggcaacgcacacgctataactatattcagagctcgttagaaatgcggcgatgcgggctcgtatccatccataagcgtaaccaggtacgtcaaagtaccttggctttcagcaccatgctgtgaggcgtgatgcactacgataaagacaaacatacgtactcggttgtaggccagttgccaaatccttcagcacctggtcgatcagccttgtcctttgttcagcccttgcaccaccgctaacctacactaggcactacaagagatcttgtgtagctcatcctctggaaccttggctcaaatcggctcgggtcggtcgatacgtgtttctcactctgctatccacttgacagccttttcatttcagctacgctttaggtccagatttgcatccagcagtaacgatagtagatagttcacgatgggtcctaaacgaaactcgcttcccgcttggcaagtccctcccctcggatggaataccccgggttttacaacacacagatacagtatcctctttttttaatagatagccagtgacgtggagtgtgatatgtttatttcggatgcgtgtggcgatttggcgagacccggtgcttgccgttagcatgggctcacaggatctgaaatgtgccctccgggtgagcgctcatgttcggcgcggagcaacacatcctgtccgcccgccgacttccctgaccgcaggataaggctaaggcgcgccaagtgcagctggtgaacgtatcctggttgctgccggcattggatccgtcaagacatcggaccaacccccaaattcgccatgcccaacaaaaccccatgcgcccaagacatcgctggacaaagcacactgctttccagactggattctggcgctcccgatagcgatgcaccggatgcaaagctgacgcacaggatggagccggatcggatgaatgcttaggttcgtatactggatcatgaccacaccaacaacaagtcctgtaccgtcatgtatgtacacatcatgccggcaaccacaggccggatcgaccaagaacgtctagcgacacctgatgacccacttgattagacgcacagggcctgcgcaaggccgatgagccctccgagttggtttctgcttcattaggatccatttgatcagttagacgttcagaaacatgcttgcatcgagccagtccggcattgtttttttaataagagatcttgatatgtgtttagagctacagcaggtgaattcacgttcagtactccgagattggttgtgacggggcacacagcacttcttaacagaggaagctggagtatacaaactccaagtaaacagccgttgacgtgtccctggtctgaaggggacgacttgacttgcaacagaggtagatctaagactgagtgtatttataggttggtacagatttggcctacataaaatcctaagttccctatagcctgtgtcatacaaaacgtatctgttggctctgaggccttttgggtcactatccaggggagtgaccgatgcagccatcccggaatagtgacagggtcactattccatgtaaccccgttacatcctcccccacttagattcgatcttatcgaccaatcagagcgaggttacgccggcaactcacatttcactcgcaaagtcgaaatccaacgacaacggcgcgagctccggcgcctcggctctctggcctcacagagcaactggcgcatcaccgagcaagccgcagggtctccacgtcgaacggaaacatgcgcagtgtgcgcagtgcgaaagcaccttcaaaaccgcgggccgtcgggccgaagaccagggcggccaaggccaaggacgtgtcgtccgcggtgaaggaggctacgggggcgaccgaggaggcagtgcgctctggtagtagtacgccggagggtggccgtcaggcccaggctcggagcaagtctcctgacgccacgcacggcatggaggagagtcctcggggccgtaaaacccgatccgcgactgggaagactccgtctttgtccgcacaatgatccggtactccggggggcgagaaagtctccgagggtggcacgcacgctgcccaaggcacggagctggcgggaggcgacacgaccaacgccccggccgacgcaccggcctcagccgagaaggaggcggaggacaccgagtccggcgcaggcgacagcaagccgtcacacgacggcgtcaccatggccgacgctgaggccgtggacgagaagtcactgagcgacacgggctccaagcccaagggggtgccgtcatcgaagcatctgacgctggcacaaggtcgtgagcgtgcctaagcgtcgaaggcggctgccgctgcgaaggccgatgaggccagggcgaagaagcgttccgcttccaggtcgcctcgcggctccagctccaagctgttcagcgactcggagtctgagaacgaggagggtgccgtccactagcctaaggagctctccaacaacatcggcgagccgcagcagcactaccatgctgctagctcgggcgcgtatgccaggcagctgactgcagcgactgctatcgagtcttcttcaggcgggaatgccacgtatccacagggctacttcccgcccgagcctggcactggcgcgccagcgctgttggagaagctctcggctcctcgtggccttatcggcgggtaaacctcgaggggttcctatgatgcgtgctctcgttgagaaggagctactctttcttggtgacgttgaagccgcccggtgtgtgctactagtaccacacaagctcacactgaaggagttcaccacgcttcgcaagaagctggaggacaagggtggactccatcctgtgtggagtttccactgggtcaagccgaatgacaacatgacctggagcgaggtggaagacctcttctggcgctacgtccagcgcaaagggtattccgaccaagagttcaaagagctccgtgaggatcgcactctgtccgctatcctggacccgcgagctccgcatcgagttcgctcaacacgtgagctagcgcatgctccgcccgaagatgaccgagctgaagcaagaggcgagagccaaagctcgtgaagagcgtggacgcggtgcgactacgtctgctaccgtgccccgggtatcggccaagaagccaaggactacttacgaagctgccgctgcttctcgtcccatatcgcaactgctttcgggcggtctgcctggagctgctcaacaggctcccacgagttatccgacccagggtaacccctccacttcacgagcagctgtcgcttgccatggagccgccgctcccggacaactcgttccacgtggtagtggatctgcccattatgatcaaggagggccggcggtggcctcgcacggccatggctacgagtctgaggcgacgcagccgtatgctggggccccgagtcaggtggtggccttgcagcaagaggaaattcgtcttctctgggagcgcgtgtacgtcctcgagatcgcgcttggcgtcggccttggtggcgcggctgccgctcgtgctggtcagcctggtgccgtggagcggctccgtgaggatgttgtctcgctctatcaggagactcgcagtctccatggccgcgtggatcgtcgagctgacctgtcctcttacgactcgctgcgaaaccagctcgctggccttcgggccgagcttcatggccacgcgccgtatacggagcagtagtatccccccttatatcaggcccagtttggccagggttcatacgggtcccctgcgtatactgctccgatgtacgccgcgccgtcttacgaccagcgcgcgtaccaggcgccttgccgcgacccgacgccgcgctccgaggagctgcgctcttcccccaccgggccaccctccgctttctgcggggcggccagagccagagggtcatggtacctcttaagacgacccacgtaaaacgtcgggtgagtcgtcattgacttgggcaagtctatggtgtacgccgcgccatgccggctgagaccgtgaagggtccaatgaagcggtgcttcagcttgttgctctcgacctagctaacagtgtttagcggtaggtttctagtatctaggagaactaaatccccaaccttaaacacgttcatgtttcctcttccatttcggtcagagtactccttctgtttgtattgggcttgcgccatggtaaatgtctctcactctgctgattatgttcagcctggcttcgacaaacgaggacagttgcttccgcaaggcggctggactcacgtcggagacttgggaggaaaaggttttccgagcctctccccttcttaggaccgaagccccagtgctgcctcgtaaagtgagcggcacctgagggtggcgcaacccgttcagataaaagggcgtaaagcccgtcgatgcatgcaccgcattgttgagtgcgaactcaaccatgagcaaatgatcaacccaagagcggggcatttccgcgcagatactgcggagcatgtcctcgagcacgcgattgacgcgctctgtctggtcacccgtctgcgggtggtccgccgtcgacatcgacagccgtgtgcagagaaggcgaaacagcgtctgccaaaacgcagcggtgaaccgcgggtctcgatcagagacaatggtctcgggcagaccgtggtggcggaagacacagtccatgaacaggcgagcgacctcatcgccagtgacggcgtcacgaactggagcaaagtgtaccatcttgctcagacggtacacaaaggcaacaacaccagtgttgccacgggcatcggccggaagttcgaagacaaagtcgagactcatcgacttccagcagtccgctgggaccggcaggctctgcaatggtgccgaggcgtgaccggcaggcttcacgcgctggcacgtctcgcacgtccggacgtaggtggcgacccacttgtgcatgtgacgccaccaaaacgtctgcgagacagacgcgtacgtcttctcacagccgagatggccactggatggagcgtcgtgcgcctccatcaggatgtcgtacttgagatcctcgtcgtcgggtacgacaatacggggaggatcctcgggctcaaccctatagtgaagcaagccatcagcccactcatagcggtgcagtcttgcacgctgtcggggcgtgagccactcggccttggcgtccgagccagcggccaagaaccgcacaagaggaccgagactggcatcgtctcggtaccccagcctgatgcgatcataccgatccgtcgtgacccgactaatgtgagcaagctcgtagtcgggtcggcgcgacagcgcgtcggtaggcacgttcagcttgcccggcttgtactctgtactcgacatggaggttgtattccgcgaagaatgacagccagcgcgccatccgctgcgagaggtgcggcgtgttgacggccgtccgcaagaacgcgtggtctgtatagacgacaaagggcttcgagcccaggagatgtactcggaacttggcaagagcgtacttctacttcattgcaagtagctccttgtcatgaactgggtagttccgttcggctgccttgagctgcctggactggaacgagatgacccgttcgcggccttcatcgtcggcctgcaatagcgcacagccaattgcgtagccagacgcatcacagacgacgctgaaaggcttcgtctcgtccggcaatgccaggactggcgcgcgctgtaagctcgctttgatgtcgtcaaaagcatcttgatggcgacgctcccagcgccagtcagcatccgtcttcaggagatccgacaatagctgtgccagcccggcgtagcagcacagtacttgtgcaaatacttggccaggcccaaccactgttgtaggtccttctgtgaccgaggcggcgaccaagccgtgatggccttcaccttctctgggtccgcggggatcccggctctgctgctgacgaagcagcccaggaccttgatctcctcaactgtgaacacgcacttgtcgatgttggcatacagcttgtttgcccgcatgacttcgaacacacggcggaggtgctggagatgcacctccatgaccgtctggcctgcctcgacacggctgtggaccaagatgtcgtcaaagaacgtctgtgcgaacacacgcaaaggtcagaacagttgtgtgatcaagcgattgaactttgccagggcgtttgaaagcccctgagacatgatcagccactcccagatcataccgctcggcgtgctcaacgcggtgagcgggatgtcgctctcacgcatcaggatctggtagtacccatccaccaggcccagcgtgctgtacaacgtgcagccggccatgttgttgggctacaagtccttgcgcggggtcggtgtctgtgcaggtacggtcgctctgttctgcttgttgtaagcatgaaccagacgccactttccgttcggtttgcgaacacagaaggtaggggtcgagtgcggagacttcgactcccgcaccatgcctgccttcgccttggcggcaaagaaggcatcaatgacttcacactgctcccggggaagaggccattgcctcgtgacacagtacttcgtgcccggtacgaggtcgatcccgttcctgattccgctgtctggagggagattggacggtggatccttggacaccacgtcctcgaactccttcaccaagggatacaccgggtcccaggggttcttgagaatatcagagcccatgcgcaacgcgtgctgtctctggaactcctccaggagttccttgtccataaccgaggacgagttcaacttggccgacgtggactccggtcggaggagaaccaactctgcgatctccccgacctttagctcggccaagaagtcctccatggcgagctcttcaaggctcagcaactctgaaacctcgggcagagctgttagctcgacagctcctgccttgatccgacgaccggtcacgccgtcgaagatgtgacaacactcttcggcggctggagccttggctggagtcgggcgtcgctggcgaatggcgtcgtcgaccacgcgactaggcccagcttacgacgtgacgctcgggtatctttgtctcgtggcgccaccttgacggcaccaccgatcttctcgatcttgtgcggaactacgctacttgagcggaactaggttacccaccttgttcttgagtggaacttggttacccgtcttgctgagtggaactatgtaacacctcgccgtgtggaacttggttacccacaccaggagcgctttcagcgactcccccatcagttatgatcggagtaacctcctgtgaaactatgttacccgcatcggaagcgcctgcagtgtcttcctcatcggttacggtctgagtgacctctcgtgaaacttggttacccacgccagcgccagcagcactttctccagcagccctttctgcctgcggtacttcgttatccgcatgtggacctaagtaacccacctggtaggtgctgtcctgcacctccgctctcaggccttgaccggcccgcccgaagtcttcgctggtctcgactactcccaaaacctcgttagacgctgctgcgccctggcggccctcgcgagcgccccagctactgctagaggtgagagtatgactcaccaaagctctgtcagagcgtgggggtcgggtgtcaccgatggccttgccgcgccagtcaatccagggatcgtgctgtggcgaagcggctccgagaaatttgaagatcgcgggggtcctcttggacacggcgcccgaagtgccgactaacggagggggtattccgatcttccgtgaagttgctgatcctcaccttgtgtacccgtcggtgggctgcatcgatcttcgggtgatcacgagaagacgcgcttggggtagagtcttggactgtctgacggggcagcggcaacttgtggcagcaacgcggatacgcttcacgctgcgccggagtagttgtggcggcttcgatccgaggttgtctggatcgacactcgccggccaggtgtgatcttggcctgggtttgccttgtggtcggcgtgtgaccttcctttgcctttctctgcttgctgcttcctatggcggtgtgggtgaagtgagggttgacggacgcaggtccaagctatcctggcgtccgaggttccttgatcttggggagtaagtcgatattcatagcgtcgggtgggccaaagtatgttccgtgcccggtagtgcgaagacgaagaccacttgatcagtagaaggtaaaaacaaactctgtttaaatgttagctttgcctaaggcctctgtcctatcgttatcctgctcccctaaggtcctggcgcgtgctctctggctcccttgagcattagtggtgccgctggctctctgcccggtggctgcgcaatccataagcctgagatcatcactccttctccaagatcacgtcatcctcgccaagatcgatatcatcggcttggataggatataccagggattgactcgccagcacttccgaagagattgctccacctgaccttgccctattggccttcgtgctcgttgatatcgtgccagactacaccgggacgcgcttgccgatcttgttccacaacgaagccgtcggttaccatgtcaatcttggtcaccattgttatcggcgcgaaaatcgccacatccactacaccacagtgtttctccagccacagcatgcccaggatcaagtcgtgcttgtccatgttcaggaccaagaacggctccgtgctgcgaagtcttcgaacttgacagcgaggtctatgtggacccgaggtacttctaccaccgtaccgtcggccagtttgacggagaccagccagttgcctttgctgcctcgcagcgcatcggcgtacttgccgcgattgcgtgcgactgtctggcggcgcgcaaagttctttgacgccccggagtcgatcaggattctcaagggatgatcgtatcccggcatactcgcgtgcaccacaagcagcccaccgctgcccttctccgcttcgagagtacacaggctctcaggggctaagtccccatggcgcgcgccacctgcacgcccctcatgaagacttagtgtttccccagtagggcgcgccgcccctattggtgtcctggcttctgccagcgacccctagagccgaagggcttcgaggagaacttcttcgtcagtcctcccacgggacaggcacgtttcatgtgcccaagcttgccacagccgtagcaccgaatgtcgctctgctcgaacatgcccagatccgtgggaaccggcccgttggtcgctccattgccggagttaccatttggcgcagcgccagaggcagggttgctctgtcataccgtggcgggggtacgagcctgcttgtggctctactcctcctgaagggtgatctaaatcccctcctccatagtgtttgcttgcacgcggaacagttgcgtacgggcaggaccgacacgcagaccattcatgagcacggtcaccttgatgtgttcaggtagggggttccccaccaaagaggcagtgagcactcgcatctcctggatgtactcatgccgctcgcgccttctttgtttgcaggcgaggaagcgcgagcgctggcggtactcgtagttcgccggaaggaacgcggtccgcagctgctcacacagctcagaccatgatgcgaagcatccaggcgttgtcgcttcgcgcgtatacgcccaactcttagcgcgaccactaaggttggagagcgcaaaggcgacacggagtcgctcgtccgagacgagagccgcgtccatcgcgagctcaacctctcgaacccagaagtgaaggttctcgccttccttcccttcgaaggggtgaaccttcagccgcagcggtttcggttgctccggcttcggcgcggccgcagtggcctgcagcctttggacgtgggcgatgagccctcgctcgtaggtgtcgaacgcgttgatacgctcaacctgctcagccggcgtcggcgccgctaagctacgcagggcatctgtcccaaagaggcctgccatcttccgaacggactcgtaccgcgagaggaaactccgtccaatccatcttggctcgctcgatgagatcacagagattcagctagtcctgtcgtgtaggaatacaccgatttcctagtagatgtaggcacaatcccttaagacaacacccactgagtcaagatgagtagcgataactcagcaggcttgtcgggttaatgaatatgaacctaaaggcccagcttcacacccgttcctcgggttggtcgtttccccttatgtcccgtggtttccttaggccaccagcaaagcccagcacttccagttacgagcgacgactggagtgctcttaacacgcaacaaccccgcggcccctccaaaggaaaagtcctggccactggtaggccgttcgcgagggtgtcagagaactctccgacggtaagaatcaataggaaagcacttaagctgcgacccaatacacggcggtaactcgccttcaatacacggccctttctctactctcttggccttgtcggggtaaacgcacaccactatgctagtaggcacgctcaccgacaggcatctccctccctacaagattaccttggacacgggtcgtcacggaccgtgcagccaatcatcgccgatcccgttggtccttgtctttttgccgcaaattgctgcaagctgctgctcagctgcggcgagatctcgggggcaatttccaacaccatagtccaatctacccacgtaggcgtaggattgactacaagtgctaacaagtgtgacggggcacagcacttcttaacagaggaagctggagtatacaaactccaagtgaacagccgttcacgtgtccctggtctgaaggggacgacttgacttccaacagaggtagatctaagactgaatgtatttataggttggtacagatttggcctgtatacaaatcctaagtttcctatagtttgtgtcatacaaaatgtatctgttggctctgaggccacttgggtcactatccaggggagtgaccgatgtagccatcccggaatagtgacagggtcactattccatgtaaccccgttacaccgatagcaactgttatatccgacaaagtcaaacaaccaaccctctatttttgtcatatccgacaccaaattggtggccaaacggtactataatactgtgtacatgtattacagcgcacaatgtgcattcacttcattgcagtgttgttatgcagtacaagttgtacagtacaacttgtgcatagtcggcgatgaggaattaccaagttggtcgttgcactgtttgccaagataaaccccgttactttctggcaaacaactgcacgtacatgtactgtgagcctgtcggagacgcgatgtacgatagtcgtcttggccgcaccgaagccatgcaaatccgtgccggtgttgctaggttgaagctgatctgaatttccagaatttagagctggtttagaaacgctcgctctaactgtaccgtactgtaccaatttgatctgaccctgtgcgcagcgggcacgcctgctgatttggtccgccctctgtcggcgatgatgtccttggtgcggctgtcgagccgaaagtgatcaacgcgttgtcctcgacagccggccccatcgcagcgtgtcttccttgcttctctctgccggtggctctcgcttcgccaacagcagagctcttgagtcgccggcagcgccgatctgggctcaaaacagacgctcgttcgctcggcttcgctgatcgacagcagcttctggtttcgcatggtgttgtgcagagttgtcacgagattccgcgcacgctggtgaaacgcgcaaagccgctcggctcctccctccctctgcgcccctcgcaaaaaggtcgccgaccattgtcgagacgtacagtagcgttgacgctgatcggtgagcggcaccaacgtgggcgtaagcactccattgccgacgtcgcagcgctctgaaagcgtaaggggcagcagatgagcccctcgcgattctacagcttctacagctccgatctgacggcacatcagatttagatctgtgcgacccagatccgcgtgtttctcgcgctttacacatcccgacctacacatccagtgatcctttcgattgcccgctcggcagtcgctcgttgcacccctcctcctcctccatgccggttgcggcgccgcgggcagtgccgagagataagtacactgtatccggtcgtacgaaaattggggcgccgaagtcacgatcggaggctcattcacgactggccaccgctgacgcaaactggacggcggggccagctagcgccatctccaactgcggccggaaagcgtcacggcatgccgcgtccgcgttcccagctgccctcttcggcaggaatcggtcataaatcatcgccgggaagctccgcctggtgggttatgtctgcgcggcggtgtccaaccccggtgactgctgcgtcacccgcgcttgacgccgcagctgggctcacacacgcagatactggcgcctgtatcattcattcgaccttggaacaacggccgccaagtgtgacttacaggcgggggcttgcgatcccaagcctgctccgctcctggccggagcagcggcgctgctggggctgattcggccgttgcccacggcttccgcgaacgcacgccgcggcgccgcgacgatcgcccgacacacaggccctcgtttcacaggaaagactcgtcaagcctcgctcgcttttggtccgttatcgtcgagtctgaaacgccaaatttgaatcgctcggccgtttctgttcctgccgaagaggcacggccgcggccaatcggcgattgcgcagagaccgagcagggccccagctggcggtcgccacatcattcgcatgcttgatggaggccgtcacgacggcgtcatggatctccaaggccccattattcaatcggcgccagccccagcacagcagcgacacagcaaccagcaacaggaacagggaagcaccatgtcgacgccgtccaagaccaacaactcgcgcttggccgccatggcgcagctggagaaggccgcccgcaagctcaccatgtactcgcgggctctgcgcgagcagctcgcccggctccgcgaggaggtcgcggccgagaagcaggccgtgctgacgtccgaggacgacgtgagcgagtcgtccgcgcggctgcaggagattgaggagctcatggccaagctgcagctcgacatcgacgccctgcgcacgctgccaccctctcaggacgacggcagcctggccgcgcgcgagcaggagctcgaggagctcgaggaggagcgcctcgaggagctggagctgctcggccacatccagatcatgctgcagatgcaccagcacgcgaaaggtaggatgcagcgcatgatcgccgcgctcaccaaggaactccaccgcgtgcggcagcgcgaagaggccgtcgtgatcgccgcgctgcgcagccgcatcgtcaaggttttcgcccccaagatctaagcagcaccgagctcagacgccgccagcaccgtcgaggcctggagcaagacaccgccgacatggacgcgtaccaacaacccgtaggcatctctccgcagcgacagcatagacgctagcagctcacctgcggagcttatttattcgaacaaagttttcgaacgtgtcttctaaatcttatatcagaccttgagtgatttggtatccatgcaactgctgcaacaacgtaggtgcgccatactaccaggagcattggattctgatagagttcgccagtttcacgaagcagggtagaggcatggtatgatacgtgggtttgtcattcgtgtcctctaggtgtgattcgcaccttgatctctcaccagggggtgcattatgcaggtaacacacaacacacgacagcgctcgtcgagtctaaggtccttttgcttgatgacccaacactatcgataacactgcttttaacttttaaaaagtaggatcatcaagcagcacccacagccaaactagctggaacttggtattgatactcctcttggcctaatgacaccaaactcctcgtaacattattgctcttgaactaagcgcgttagaatcttcaagttgctgctactggcagcaacgtacactgcatcctctcctacagatccaccccaattcactcaagtgaatgcggtgagtcgctacctaccggttcgctgatgtggatctagatctggatcacccagatctgaatcagcccaaagcgcccatcaaaagctggttttctttgaagaaaatcttttttggagaaaatggcgcgcgggggcttcgtgctggacgagcagggcgaggaggacctgctgcgcgaggcgctgcagaccgtgcgcgaccagggcttccgcatgcagcgcgccgcggacgcgggggaccagccggcggtgctcaagcacgcggccgaggtgctgcgcgagctgcgcacgagtctgctgtcccccaagaactactaccagctctgtacgcctgctggcgacggtctattagacaccgatccgtagctcacgcctgcgcgtgtattgctctgcttcagacatgcaggtgctggacgagctgcggcacttcgagagctacgtggaggagcagcagcaggccggcgcctccatgcgcgtgctgtacgagcgcgtccagagcagcggcaacgtcctgccgagactgtacgagctccgcaacgcattggatatcgatatcaaaggctgacatcagagctactgtatggttgtatgacttgctgcaggtacttgttggtgacggtgggctctgtgtacatcaagtcgaaggaggcgccagctcgagacgtgctgacggacctcgtggagatgacgaaaggcgtgcagtacccactgcgcgggctgttcttgaggcactacttgtcgctcagcgtccgcgataaactaccagacacaggctctatctacgagcaatcgggcggcggcactgtcagcgacgccatcgacttcttgctgcagaatttacgcgagacgaaccagctctggatccgactgcagcaccagaaaattgggggctcgaggccgctggcggtgcgggagaaggaaaggatggagctgcggctgcttgtgggcacaagtctagtgcggctcagtcagatggaaggagtcacgcgcagcgtctacacggagcaggttctgcctcgactagtggacgatatcgtgttggcctgcaaggattccatggcgcagcagtatctgatggactgcatcattcaggtcttcccggacgagttccatctgcagaatcttgagaggctgctggacgccgtggaaaagcttcaggcgggtgtcgacgtcgcgttggttctgacggcacttcttgaacgactcacgaaatttcgggaagcacagggaagtgtcaccaatacagggcaacgggtggaagtggatggcggtaacaagctggaacaagaagagcacgaggggctgaaggtgttccagcaggtgatgaacacaactaccacgttactgctgcgctcgtctcgacatgtccctggaagcggagaggcacccagtcaaggtgatggtggagacgtgcacttggggtcagtattgccatttttcgtgacgtttgcgacctttacgctcgcctggatgggaagcagcaagacagaaaaccctgatgcgactgcggcactgcagcaaatagtctccgggtgtttggcgttcttacgtgagcgaacagcttggcgtgttgacaaagataagcaagttcgacagctcgtggtttctcagctcgagtcgctcgcgctcacgctcctgcgagcgctctctattcaggacctaatgcaagtgccagcactacgtgaattgcttgcgctggtgccatggcaaggcgcttggaaggatgttgctctggcctggatccgcgtgctgcttgcgaggcacgagcgtgttcgcaatgagaagcaaatggactttttgctgcaggtgctggcgccacttgtgcgggacgaccccaacgagttgccatcaccatctccagcgactgcagttgaagctggaaagaacaagagcgctgaggtttttgaagctgagcagcagacgctggccaaagtcgtgcaccttgtgtccaatgacgatctggacgtaaagtttcgcgtattctcggtggcacgtcgagcattcctacaaagtggcgtgtttcgtattcgctttacgcttgtgccgttaatctaccagtcgctggcgctcgctagagccctcgcagctcactcccaggagaagacgcaaaccgaaggccaggagaccaaggcagacacaatgacaagtgaatccagcggaagctccaacacatttgttaccacacctcgcgaagttcttcagttcgtgcatgaaatggtgacggcgctggcctccaagcaggacgcgctgtccgtatcgtgcgtccacttgtttctgcagtgcgccctggtggcggatggatgcgtctttgaggcagtcgcatacgaatttatcacacaggccttcatcgtgtacgaagaccaaatcactcttgcacgcgagcagtggcgcgctctcgagcttatggtggcgtcattgcgtgccacccggaatctttcgacaccaaactatgaggtgctcgccaccaagaccacgcagtacgcagctcgcctgctcaagaagaatgaacaggcgttgatggtgttgaactgtgcgcatctcttttgggtaaatgttgtagcgtggagtaatgctggtatctcgtgcttacatttatgtattcgtggttgttgtctgtgcgttattggcatgcagcacccatctcaacaggatggcaaacgtgtccgggagtgccttcagcgatcgcttcgtattgcggatgcgattaaggacaccgcgtctaaccaggtgccgctcttcctggatatattagaagcggtacgtttgccatttgaaatggttttgagatcactggactcagttctgccgactatgatcatgcagtacttgtacttttatgaaatgcagacccccgaggtgacgcgcaactacctggtggggctgctggctctagtcaaggaccacttggacaatatggagcacgggcaaatgcgccgagagggagagttccgttatcgcgccatcgtgcgctacatggatgtattggacatcgcggatgataccgtctccacctcgtcgtcatcttcgtcgcggtagtgtccgccctgctctgcgtactgtcactaacggtgatctaatactgaagttatgcgttgagtgcgcagattgttttcttctatcgttggtctattgtgtttgttgcggtagcctcggagacccgctttcctttgtatgcagtacttcttcgtttgtcgactcaggtgtgtgcacattggtgggcttggtaacgacgatatctgtggtcgtagaccacttgagcgtcaagggctggaccagcagatccatggcttgccacacttccgtcgcggcgccatcacatccgacatgcagctcgatgtctactgatgggtcccggagtaagcttcgcatgcgtctaccacctgaactggccgccagagcttgttggagcttgcctgaagtgcgcaactcgctctctcgcccgcgaaacagtgcgttgtcgccatgaaacacgacgcccgacaagaacactccagtctgctctcatgagaccaacaagaaagtggttagagcagtcgatacgccagccaaactgagctaacttctcaccgatagcatgcgaagagcgatgaagagctcgctcagttctttaccagagaggtagttgaatcgcacgacgacagcagcgtcgtgggcaatctggatcaaagcgggtgcacactcgtgaagcgctttagcgacgtgcttgatcgactgttgaaccctcgcgctcttgtgaaggtggtgcagccgtcgggatgctgcgtcttggccgaagaagctcccatccgagccagattgcgtcgagtacactgtgtctccagtctcagcgttcatgaggaacccccgagccaaggagatggttgaggagatttctgccaaggaagctgctgcctcgtgatcccagcacaggagcgagttctggatgccccgagcgctaatctccattaccaaaccgacgaagtcagtctggaaggcgacgaactcgtccaaggtgccttcacagccgtcaaacccgcccaaagcgctcgtcaacgtgtactcttctgccttaagcttggcttgttcaagtccctcggcagctacacgctcgatgtcggatcgatagcttcgagcaaactcctgtaggatgatcaagctcttcagttgtgcgagctgcagtggcagaacttcggtggggaaggcgtttccattgcatgacgttgttggcggtgtggcgcagatcacagcgaccgagatctgagcggccacgtccgaggacaccacgacggtaaagccgttctgtagctcgaggtggccgaacgactgtgcctgcgagaagtggaagaggctggcgagcagcatggcgagctgcgggtaccggaagggcagcgtgtcgtcctgatcccacagcaggagaatgcggcccgaggtcgtcacgaccaagcaggccacggccgaggaggagcttccgtcgggcatccttttcagcctccagcctgcaggttcgtggatggatcagtgaccaagcacacctgtccaagcacgcaaaagtgtgaaaaaaactgccatgcacgagctcatgctagccgctatttctgttgtcggtgtacactgcgttgacgttggccctctggcgaacaacgcccccacagctttgcctctgcaggttgcgtgcacacatcaagtccaaggtttctgacatccattcggcggtacagaccgaccgacctgctgcaccaccagaaaacgtagcgacgcactctcgtttctctcctgttgtatttacttgaatgttgtcttctccctgatcagcgactgcctcaaccggttggctgctgctgtctccacccagcacgcgcgcttagtgggcgtggtatccctccttcatctggtatcgcacgccgcagtacttgcacgtctgcggggtgtggtgcttgcgcgtgtccagctggatgtactcgaccgggtggccgagcgcgccgccgccgccgtcgcacacggccacggtgccggccacctccacgatcggcaccttggcgatccgctgctcggcgtcgctgcggtggcggttcacgtcctaaaacgcggcgatttagggataaaacatcgttaattagcggcattcgaccggagctcctcgcgcgcgacgcacctcgtacggagtcttgaggtcgtagatcgtcgagaagctcgcgctctgcaggcggacggcggaggcgaccgacgtggcggcgcggggggcgcacgcgcgcgccgcggtggccaggagcgcttgggagctacgacgcagcatcttccgtctggtggtccgtccgttgactatggggctgcgaatgtgaggccgtgtgccagcactcgactaagtacgaaatgattttggtgtgttgtttgatgtgcgtcacacaagtgtgccatttttcgtgtgtcaataggctggtcatgacggcgctggcggcggaggttttggacgctgcagcggctggtggcgagaggttggaggggatttctgtgcgtttatgtgaagaattcgcttctgcaaagacgttcctgcagtcgcggcctgcgggcgtgtacacgtgtgcgagagcgacggccctgtcgaaggcgtctacgaagttgtccagcgtgctggtagaatggtccttccacttgcaacggctgcgtaatggtctcgccacgttggacagcagttgccatcgagacaagctgaagttggacaagttgcagtcggtcaccgagctgctggcgaccagagcactgcagcagtggcaagcgaccgagactgtggacggaatgctgtctgtgctctggtactcgctgcccgacgctgcagactacgccgtcgcggtgcatatctgcccaatgcccacgcccaagtgcctggcatccacggtgctggtctacggcgaaggccgcgacaacgctcggtgcaaacacacgcagtggattgaggaccgagtgcccattgaagagcacgtcgctcagctggtggagtctcgaggcgagccgatccacgaggtgttgctgagcaaagctgggtctggaggtgatcgactgctgctggaagggttaatcaccaactttttcgctggtagggcgcttgtacattgagtggagaggaggtaggggagtgctgaagaaactgacgcggtggctttgacgattgcagtgaaggatggcaagctgtacacggcggacgaaggtgtcttggaagggagcacgagggagttggtgttgaaggcgtgtcgcgacctctcgatcccggtggttctggaggcgcccaagctctcggagcgagactcgtggcaggcggcgttcgtaacaagtacgtggaacgtttgggctaagaagtgaccggcattcgctaactgctagttggtggttgtgtgaaggtgctgttcgtgttgttattgatgtcacgcgtgtgttgagtgaagaagaggaagcgggtgggaaggtgcttcgtgagaccttgattccaagcgacagtagcggattcacccaaaagattcgagaccagatatcgttgaggcgcatgtacctcgactaaaactaagtgaacccgatcggtgatgctgcaaaggaggctcccttcgcgcaaggttataataagactttctgcatcaagccttcgtcacggaacggcggcggcagcaaggatttaacagggatgatataggtagcactacagtgtagattgcatatagggtaatgaacagcttcgcgccgaagtcccgtgttgaggctgacgctggttgataaaacgtgcttcgctttgctcctcaggattgtctgcacatgtcgttggtctgtggggcttcatcgcgagcgatcggacttgccgagctcgaggatgtatcgtccaaggagccgaatcggacgggaaccgaggggtgtttcggcgtcgagtgttttgctgagtggcgtgctggctggtgctcgcccgcggcaggggctggggcttgcatcagtgggagctggatcaacggcatcgacttgaagaagtcacggctagcagcagcggaggctctggctgcctcctcctcagcctcaaacaccgccagtttttcttgaatatctgccatctccttatcgagagcagcgttttccgccactatggctttcttctccttgtcgtgtgcaatcttcagggagcccaagtccttcttggcctgagacttcaactggcgctcaaacctggcctgctccatccgcatggtgtcgatcgttttggcatgttcgttctgcagtgcaagcaccttctgcgcatgctgtgtcctcttctgcacaagctcgcgttccaactgcacaatctgcgccatcaactccttttgctggaccagcagcgatcgctcctctttgtgaaaattgcgctgcttttccaaaacttgagcggcagcagcagaaatttcctccttacgttgacgatccgccacaatagacttttccagctcctcggtgcgactgcgagcccatgccaggtcactttctgcatatttcatgcggacttcgtgcttcaggttcatggtcgtgatcttagtcgttagtcgctccagctcgctctttttggcgttaagctcgctgtgtaaggcccgacgcagttcagaaagctgctctgtagcctgtgcgagttgctcctcgtacgaatgcttttggtcatttgctgatgtcgctgtgtctgtatcctgggtcctggcgagctcgtaggcatcatggagctgttccttttcctcctgccagctctgcatgtgcttctggtactgacgaagaaccatcgtgccccacttttgaatggatgcgcgcacagattgcagcagagctgtctctaggctcttgtgcactgctggtccacttgcttcttgtgcatactcgtctaacgcactctgcagatccgacttatactgcgtcagcaggcggatcaaaccatcagaaaagtcctctcgcggtcgttcagcgagttctgcagccatgtcctcaaggttatgcggaagcacacgctctagaatcttcgtacagatttcagcagagagcgtggtgttacgctccagcgttgcttgaaagtcgcactttacttgtgtttccagctccgctaacttgtccttgaacggcgctttttgcagcctctccggaaggtttgcgcgcacctcacgaatatgcgccatggccgtctggactcctcggaaatgcgcaagctgcagtttgcgattacttagagccttctggtcgtcgatcacagaactcttcacctctcccatttcagttgaataagcctgttttgccacttcaaacgcctcccccacttcctgctccagtagcgcattcgacgctgtctgcatcgtcggcagttgcccagcattcattgcgttcacgtaagcatcaagcactgccacaaactgttccgagcgcagctcatgtcccatcaacttcttcgttgggagctgctgagctttctccgacagatagttggcatataagtcatcaacagcttcgacgaattgcgtccgcagctcacttctggcagtcccaggtggcacaacttccgtcccattgccttccacggcgcgacttagcgccacgcagtccctcgcggggaaatacgactccaggtacatacgcaacatgttcctcctcgttgcagcttccccgtatcctccctcgggagccagacactgctcgaaatactccatcggcgtcaacttttgcccttcggagcccttgagccacttgagtttaaatttcctggccagccagacgaacttgggagcgtgatcatggaactcactagctgcagcacaggtagcagacacaacagcaacaatagggacagctgttagtgtttgttcccatgatataagggttttcccgcactcaccgacggcttcttcgtcctgcatgcccttgatcctgagcacttgagccaccttctccacccactgcagcctctccacggcctcggcgtcgatctctccatctgcattgtacagcagcgcggacgagagcagcagcagcagcgccagcctctggttctccgcttgttcggcctctagcgccgctccagtggccagaacgacgcgtgctgtgtctccatccttccgtccgtctgcttgaggcagccacagccacagtaacacgtcgctgttgccctcggaaggggcggaaaagtccacgtcttgaggctgtagcagagtgttgagcagcagtcgcttgccagtcgctggagcgccgaatacgcccaggacgcccacgtgctgggcgtgaatcaaaagcagagcgtcccgcgcatcggatgagaccttcagcaccgttccattgtcgctgaaagtcgcgcgaatcagcggcaacgcgcgccacggagccgccatcggagctgctcgtcgagtagagaaaattgcctttctcgactgattttgattggcagaatgggcgtcctaaatgggtacttggtaccaaataataggtcttcgattgtcgatccgaccctttacgagtatccaaacgacacgtaagtaactttagtgatggagctctcgtggtgggaggttccgctcttccgcgagcctggatggaggcccagcgccagccccgtgccctacttccagggcgcgctggtgttcatgacgctcgtgttcctgttcgagacgtacctggacctccgccagcaccgcaagctgcacgacaagcagttccccaagcccctggcggaggcgatcgaaggactcggcagctacagcgtcaagaagaaggagaagaacgaggaggagaaagaagatgagaaggagaaggatggagaagacgagacgcagcagaaggaggaggaggaggaggagacgacgctgctggaggcgacgcgcaccaagttcgacaagagccgcgcctatggcctggacaagagcacgttcggcttcgtgagcggcggctacaaccagctggaggcgacggtcttcctgctgctcggctacttgcccttcgcgtggacgatgagtggcaaggcgctgctggcgctgggcctggacgcggacaatgagatctacagggcattgatgctgctgacgctcacgacgctgagggacacgctggtggggatccccttcggactctactcgacgttcgtggtggaggcccgccacggcttcaacaaacagacgctcggactgttcttcatggacaagatcaagagcttcatgctgttcgtcgtcatcggcttccccgtcacggcggccttgatctacgtcatccggtggggaggagagtacttctacatgtacgtctgggccttcctgttcgtcttctccgtcgtcatgatgacgctctacccggtgctcatcatgccgctgttcaacaagttcacgccgctggaagagggcgagctccgcacgcgcatcgaggcgctcgcagcgagcctcaacttcccgctgaccaagctcttcgtgaccgacggctccaagcgctccagccacagcaacgcctacttcttcgggctgttcaagagcaaacgcattgtgctgttcgacacgcttctggagcaggccacgcatgatgagatcgtggctgtgctgggccacgagctcggacactggaagctctggcacacggcgcagggcttcgtgatccagcaagcgtacatcctggcctcgttctacgtctttggcctttgcatgaacgacgccgagttgttcgcgagcttcggattcgctggcgactcggccaagcccgtgatcatcggcttcctgctcttctcgcagacgatgtgggcgccggtggagcacgtcttgtccttcctgatcaccctgaacacgcgcaagaacgagttccaggctgacgccttcgcggtggaccttggtcacgacgttgctctcaagtcgggactcaccaagctcgcgatcgagaacctctccaacatgaatccggacgagctgtacagtgcctaccactacagccacccacctctcgtcgagcgtcttaacgccatcacggcccgtgccaagaagacgcagtaagctcgacggctcatgaaacagctagttaaactcgctaatgtcacgacacgacatttctgctgcttgcctagagttctctttgataagcaagtcatgtcatacgtagtactcgttgaacctacacacgcacaaatgtatttacttcaagattgactacactacgcagcgcgccgtgctctcctggaagcagctcacatgtcttggtctgcgtatcccgacacacaggagaaggcaacggccgaattctaagcactcgcagccgtacgcttcgttcgctcgtgttcccagttaataagggctcctggccagcacgacgtagcgcatccgtgtctggttcgggttgtagatgatatactcgctgtggtgcagccccgttcgctcctccggctggactggtttgcctacaggccacacggcaccgtgaatgtccacaacttctccagcagagtccggccggcacgatccaactcctttgcagctgtggtagtaggctcctttggcacgtccgccggctccagtgtgtacaaactgcttcgcgttgtcgtccgagttcagcatctctttgctctcacctagcgccacctcgctcagagcgaacacgcactggttgtggccattcgtcggccggcagtggcagtatgcctgcgctttcgtcaccttgtccgtgaagtacagccctttgccgaaagttcgtccattcgacgccacctcgggcggcgcgatccgcagcccttccgacaggatgcccaaccagtttgccaagtggctgccgtgccacagaatctatggcatcggagcaaaccgcgcagcagcggttagcgccaccgcattgagaaacaaacaacacacaaccagcagccatagaaaacaaaccaacagaaacaactcaacgccttacccgtcggttggcaaatttgcggaaaggctcaaagcgcgtctcctgctcgggcttctcaacgcggaagactgacagcaattgcagtcggtcctgcttccgcccgcagcagttcgagttgcggatatacgtctgaattagcgcaaaatcgggatccgagctcttcacaggttgtagctcgcactctaacaaatcgtaacactcatccaagtagttcctcgaggcacaccgccgtgccaccggctcgtgggccatcccacgcacactagctccgacttcagccattagctggatcttcttgcctagtttcaccattgtatcgataacctccagacgcgagtggtgcgggataagtgagtaaaagtggctactcaggttcgtcaaccgcgcccgagacacctgtcggctgcgcagcgcttggtagatttcctccaacgtctcgtatccctgtcatcagtacagtatttcgtcagtgtaagctcttgttcacaataggtagaccgcagcagttgacgtacgcgcttgatggttgtcttggatagacgtccgagtggcagcttcatgatggcgtcacccagcaggtcatcggtgacggtgtacgcgtacgacagctccgtgtgatcagcaataagcgtcaggaagtcctgcacctcggtaggcaatcgcgactgtggcgcagtcgcacacgcgcaagtcgtcgtctctgaagaagcggcactggcaatgtcgccgtccgaattggcatacagccagtcgaattgggtgctcagcgaccgtcttaagcccgttgaaggcgtcgcaggaattgtagaggcagcggacgagtaagttgtccacatggcagctcgtcgacgcttgcgaccagaagacgtcaacggcagcggtagtggcggcggtgacgtcgatgtcggcactatatcaaagtctcggaagctgtcttcgttgtccacctctccctggttgtccgccagcgcgcttgtgagtgactcggagtagggcgtcccggtggaataatccagctcgatccacgtgtagcttccttcctggtaccgcagcgcatggcgctcttcccactcacaactagtgttagacgcgaacaaggtgcagaactccagcgtaaccttctccgcgctcgggaaggggcctgtgagcgtcgtcttgccggcgcatccgacgcggcccgctctcgtccagaggaagaactgcttctcgaactccagagcctgcagcgcgatgaactcgctgtggttgttgtgcactcgagcctggtcaaagcaatccacagcacacacagcgaagatccaacgttaagcctcttactattcaacctcctctaaagctatagctttagagcccaacagctccgtagccacctacccgagtgagcatagcgtcgtagaagctccctgcgcgcctcaagaccgtcgcgcggcgctggtaggcatcgggcagatacgggtccggcttgatgagctgctgcttgtcctcttcgtcctccgtctccgtctcgctgccgtagtgcacgcagcagttggtcctgctaccatcattctcgccttcctccgctgcgtcgtcgtccggcagctggagcttgacggctttggcgctgcggcgcgacgtcacgcgcttcttgagcggcggtgacagcaccggcagctgcggcgcgctgagctgcgagcgcgtgctggcagccacgcccgagcgtgccgtgtgcacgcgcggcaggttgaagcggcgcgagcggctgggcgtggcgggcgccggcgacgggtacgggaagggcgaggagctcatggcggcggcggcgggcgacgccttcttaacggaggccgcggacgcgcggcgcttcttggccatgacggcggatgggcggcggcttgtggagctcgaggcgcggctggaactgaactggggagcgtcgcggctttctcccttcttcggctctggcgggtctgcctgctggtcttctgggtcgggtcggcacgcggcgccggtgcacttgaagtttgtatggctccatacagacacaaggcgaacggtttgcagaggatcggtgttctcgagtgaaaggacggagaaagggaggagcaaagcgcactgtgcaagcccacgggcggcaatgtattggcgtgcccagttttagtattatatgacacgacacttggctcgtatgcttgcttgctacgcccgagatgtagctggcgtttgcgggtcaatcacttggacaagcattgaaaggcatcccgagcgagcggacgccagtttttggacggccacgaacacgcactcgcactggatcgattcaatcctcggaaggaggataggtccggccacgatgccaaagaagtcggccgcaacgaagcagcgcagcgaaaagcgagctcgggcgacgagtccggcgtgaatagcgagtgaaccattgccagacgcacaagttgcctttcaacttgcacaagtcgcatgttgaaggcgaactcagatctgataaccgtccctactttacgctttggagatttgaagatcgtcgatgtcattggctggagcgactcgcatttcagccaatgctggcccgacgtcacagcgtcgagggaccgtagtgaccactaccgcatttcatacacgagacgacatggcggcggtcggcgccgtcgtggacgccgtcttcggctcgtacgacgtcaagaacgccaagcagtggcgggacgaggacctgctgcaccgcgagcaggagaagcagtggcgagaggactccatccagcgcgagtacgagtggcggcgagcggacctggagcgcgagcgccgcgtcatgaagctcgagaacgagaagcgcatcatcgacgcgcggcatcggcagctcgccgccgtctcgcagatgtcggcgcttcttgcaggcttcaccatgtccacgattgtggaggtccagatcgcagacgcgaccagccagtcagtgatgatcgcgtacggcgccgtgtgcgccctagaggtccgcgactcgaaagacatgtgacgaggcgatgcgcggcacacacggtgcttcgcgttgctcttgttgaagtagttgacgtgcatagactgacttggatgtgttgctgctgctgttgatgttgctgcagtttatagtcatgttgatgtgcatgctgacgtgtacggcgctgctgctggcgctgacacggttcgtgacgcacacactggagggcgaagtgcacgcgctttcgtccctggagctggacgtggtgtcgcccttctacggctggtggctcagcaagtgcgagcgcgagtggatcatggcctaccaccttttccgactcgggctgtccctgttcctcgcacaggtggcgttgctcggctgggcagtcttcggcgagtgggtggccgctgcctcgtgtatgacggcgctgtgcgtgctcgcgctcgcctacttggagctgcgtgttgccagtcggtggagatatctcgtgcgatttccagagcagcaggcgccagcgtcgcctacatcaagaaggccgaccgacgcgtcgccgccagcgccacctcctcattctctaactccataaacaagttcaattcgaagcaagcgcccaagcaggcgagcaagcaagcgccggggcgccaacctgtcttggctgcatgcctctgcgacattctggtcattttcttgtggcgtggtgtatgcccaaacacaatctgaagtatgcggtctcacaggtccatacaaacaccaaggtaaatcgatactcgcgtaatctaatacattgcacgctaaacgtcatcgctttgagccggtggtgaaggcagctcggtccattaggcgaaaagctcggcggaccgcaggtggatccctctcgcgacaatggcagacaagttcgtggtgcacaagttcggcggcacgtccgtgggcagcgccgactgcttcgccaaggtggcggacatcgtgtcggcggtggaggccccgcgcgtggccgtggtggtgtcggccatcggcggcaagcccaaggtcacggacctgctcatctcgctgctggagctggccaagcagcgccgcacggccgagtgcgacgagatcctggccacgctgcgcaagaagcaccacgacgtggtgagcacgctgctgccgcccgaggtgggcgagcccatcgagaaggccatcgagcgcgacctgcagtcggtctcggagctgctgcgctcgatctccatcatgcaggcctacaacgagaacgtggtggagttcatctccggccacggcgagatctggtcggccaagatcctcacggccgttctgagcgagaaaatgcagagcgacggcaagaagcaccgcttccgcttcgtggacgcccgcgacttcttgacggtcgagccggacaacgagcacggaccggtggtgcagtacgagctgtccacgcagaagatgcaggagatcctcaagagcggcgaggacggcgagctcacgcacctggtcgtcacgggcttcatctgcagcacgaccgagggcgtcatgaccacgctcaagcgcgacggcagtgacttcaccgcctctatctgtggccgtgtgttgcacgccagcagcgtgacgatttggacggacgtgagcggtgtgctgagcgctgacccacgccgcgtgcccgagtcgcagatcctgccggagatctcctaccaggaggccatggagctcgcgtacttcggtgcgaaggtgatccacccgaagaccatggcgcctgctattgtggaggacatcccgatctatatccgtaatacgtttgagccggagcacccgggcacgaagatttcgcaccacaagaaggtggagctcaagcgcacgctatcgaacggtgcccccacggcgcgcaacatcgtcagcggcttctccactgtggatgacctcgcgctgttcaacatcgaaggcagcggcatggtcggcgtgcacggcacgtcttcgcggctattcagcgcgctggaccgcgtcaaggtgaacgtagtcctcattgcccaggccagctcagagcactcgatctgtttcgccgtgcccatggactgtgctgagatcgccaaggacgtgatcaacgagacgttcttcaaggagatccacgtcggacacatcgacaaggccgagtacattgcgccgatcagtatcattgcggctgtcggtgaccaaatgaaccagactcctggcgtgtgcgctcgcttcttcggcgctctgggccgtgccaagatcaacgtgctggccatttctcagggatcgtcggagcgcaacatttcggctgtggtgcgctatgaggactcggccgctgcactgcgtgccgtgcactcgtcgttcttcctgtcggaccagaccctttccatcggcctgatgggccttgagttcggcgaggacgagaccaacagcatcggtgttgctctgctgaagcagtaccaccagcagcgcgagttcctgaagcagcgcttcaacgtcgacattcgtgtgcgcgctatcggcacccacattacctcgaagatgctgctggacttcgaaggcgacattacggaggaggccctcgcggcgcgcaaggacgagttcgtgcccttcgaccgggatcagttcctcaaccacgtgtgcgccgaccaccttccgcactggctcatcatcgatgtctctaacagctcgcaccacgtgaaggacctgtacccgcagtggctagcccgcaaggtgcacgtcatgacgtccaacatcaacgtctcgtcggcctcgacggagcagcacaacgctatgcagcagttggcagtcgagaacgagctcacgtacgacccggaggctacgcttgccatcggtgtgcccattttcaacacgattcagaacttcatccagaccggtgacgacatccagcgggtggagtactcgggtagccgcttcttgcacgccgtgttcgacaccgtgttcgctcttgatgagccggccaaggctgacctgggagctatcatgaaggacctcatggagcagtacaagaacgagttcagcgtgcgcgacatcgtggacgacgtcatgggcgtgcgtagcgccaagaaggccatcatgatcgcccgcgagatgggcttcgacatcgacatgaaggacgccgacatcgagagcccgtgggaggcgagcgctacggtggcgggaagccaggacgaggtcggcacctggagctacgacttcttgctggagcacctcgtgaaggcgagcgagccgttgaagcagcagatcgccaaggcggcggctgacccgaagcaggccctgcgtctgcgccagatgacctacatcgacgcgatcactggcaagatctctgtgcgggtggaggccctggcgccgacgcactcgtttgcgtcgctcaagggccgccagggtggctttggcttctacacgctgcggcattcgctgcaccccgtggtggtcacgggccccatcgcagactgctcgatcacggcggggtcgctcttcggcagcacactgttcctggcccggaattgcggcgcacgcgcccacaactgcggccacaagccgtgcaagccttcactaaacaagaagtaggcgagcgctgagtgacgaggctagaacctcggagctgttaggtatgcacatgagcgtcagtacatagagaaccataacgtcaagaagtgccatgttcatcaacctcttcaacacagcgctgctacgcctactctatacctgatcacaaaagagaaagccccatgctttctcgataaatactgacctcgctgcagccttacggcaatggcacgctcatccggctgccactcttggaaggcttgaccaggtatctccagcgactggcgatccgcaggttaatgtacagcagcccgcccgcgcagagcaccgagatcaacacggatgcaaccgtggacctgacgaacacgatccagctcaccactccaatttcgaccaggaagaacgccgcgccggcgcggaagagctggtacgccagcaaccactcctgctcacacttgccggcccaccagtccgtaaagggcgatacggagtccagctcgaggtccgagagctgccgcacctcgccgtccagcgtgtgggtcacgaaccgcgtgagcgccagcagcagcagcatgcaggtcagggtgcacagcagcatgcacaggaactcgaggcatccgattgtcccgtagacgatgagcagcggttgactcgtgtcgctctgcagcgacttgatctcctggatgaacatgatggagaagaaggccagcatggccgacagctgcgagacggcctgcagctggtggtggcgcgcgtcgatcagccgcttctcggactcgagcttggtcacgcgccgctcgcgctgcaggtcggcgcgccgccactcgctctcgcggcggaaggcgtcctcgcgccactgcttctgctgctcgcggtgcagcaggtcctcgtcccgccactgcttggcgttcttgacgtcgtacgagccgaacacggcgtccacgaccgccgacatggagcccgcccgcaatgcccaggaagcgccgataactaaaatgctgggaattttggccaattggagcaacgccgtgttcagctggaccaccagcgtcctccagcagaatcttcatggagccggcgggctacatgttactggagctctatcgctcctcgcggcattaggctgcattagctcgctcgacagcgtggcgctgccgacgccctgcgcaggacgcaatctccgccgtatatcaggtcgccgtgccgcactcgacgagtcgctcgtcgcctgcgttacttcgcatgtatgtccgcttggcgctggccaccacgctggacagttaagtgagttaagtgagcagcttgcggtgcgaccaagatagctcgatgcggcgtgttgtcaaggccgctgcacctggctgcagcgaaacagtccggtctggacacggcgagctgctcaaggtcgcagagagggttgcggcgcgctggccccgtttcgagatcgactggtggtggcgccgccaaaatatttgagcccgagctcgcacatgcgcagaggattgctgtggctcgctgcgcacgagcgcagccgacgctccaccaaaaagtgcgcaggtatctagtcttggcagcgttccgcagagggaacgcttgataaacgcgttcgtctacggagcctggtatatcacgccgagcggattttccctgcagttcggacagagaacgcctcggtgaagccaaacgttcgagcatggaactcagaacgccgcttggggcggatactatccgctgcgcccgccggatagcaatctagctcgatcttcagcttttgggccggatgacgatcctcagctttgcgagtgaagtttgcgccacgtcacaacgaccacttcggattggaaatccgccgctgatcaagccgaacgtatcagcgaacgtcgtcttgctctatggggcgctctatcgttggcgcatgatcgaaggcaaaggcaagggcgagcaggaaggaagggactgcgcctttgcacgctttgactgcagcacgcttgactcacatgtgagatcgggagtgtgtagggcaattggcgcaacgctgaaacgatgcgactcgccacgtgtttcccgagcgcccgccgcaggataagtggggaagaacacgaggccgagcgccttcgcagcaaccagcgagcgagcgcatggggccccctcgtcctgcgctattctcggccgtcatctcgaggcccttgtgcgaggccggccgattgtttgtctgtttgggcgcgtctttgcagcaatttgcgggcatagtgaaatcaagtcacgacgcgacgtagggctcggttgaagtcgagcaagagtgacggtcccttgtgcaactctccacctgttactgcctcaacggcatgtacccggcgacatcctgtcactaccgaatctgcgcgctgggccacagggcgcgttgactggagcaatcgcaacaacagcaggaaacaacagcagagccattccaggcgcacgatagcaacatggcgcacggcagggtctcgcgcgcggtggcgcgactgctgcgtccgttccaccgccaccagagcaaggacgttgaggcgccgaccaagcggcagcgcggctccatgacgtccacgaccacctcgtccacgtgctccacgacgtcctcgcgcagcagcgccggcagtggcggcttccgcgcgtctgcgggcgcgcgcgccttcacgttcaagaccgacggcgacggcatcccgcactcggtcatgatgccgcccgccctcttccggcagatgcgcgcgctcacggagcaggcggcggcgctgagtgccggcgagcagatgcgcgcaagccacaagggcttcgagccgtcgctctccacctcccgcaccacgcttcgctggagaggcgacttcagcaccaagacactcgacaagttggtcatcatcctcacggaagacgactcagacggcttcgccagctcgattggaaggcgttcggccaagcaggtgtcgctggacactgcggccaaggcgatgctccagctttggacggactgcatgcagatccttgacgtgctggcggatggggccgcgcccgagccgtcgttgaggcacacggtcgcccactcgcgggacctcgcgatcgctgcggcggcggagaagcgccgtcagctggaacaagcggcgttgacgctactggccctcgtgatcagaagacacgagttcgatgccttgctggtggcggctggtcatggcggctgcaagagccacaagccgacggacgaagcgaggcacggcaagggtcgattgtcgagacggttgtctcgcacctcgcgccggtcgcgcagtgtttccaccaccgccaacagtggaaaccgttcgtcgctgtcctcaaagccgactcgacattcgaggaagagcgagcgctccggacaagaccgcaacgcgaaactctgcgacctggtccaccggttcttggagctgcaccagtcaacactgcattatgcctttgagacggtgcatgggcctatcgactccagtgacagcaacgcggaattcaactcgttcgacccgcaccaggaggtgctgtcggcgctggtagcgacaagctacgtgcgtgtgccgcgactgcggagccacatactcgacaatctgagtaacctgacgccggccacttcattcactagctcgaggtcggtttcgctcacattcttgagctctcgtgcgcgcggcaaatcgttcctcgaggacaaactgcgtctgacgccgtacaactggcacttcaccatgtaccctcagtgtcagaacttgctggcgactgtgaaccgagaggaccgttgggctccctcggtgcaaatgctgcaccagctgatgagcgacacagatggatgcatgctggttctcgcgcagatcttcaaacaactcacgggtcagcaagttttgggacgcaccgactggaagaatatccctggtgcggacgttctcaaggacgcgaccctagagatcaccaaaagtctattccagacggaacttcagcagcgcgagccgaagtggcaagactccgtcgaggaaaaggttggtaacgacactgcgtccgctagtgagaaggagcctcagccgttccgcgattccttttcgctcatggacggaagtttggaggagatcgacaccccgaccgcgtatttcgctgtccaggtgacatcaatgatgcacgaaaacgtcggattcatccacgagtacttgatgacgatcctacgagccaccaactacatgctgccgcaccacgtgattctctgcctgcagtacatggagaagctgatgctggagttcccggctttcttcgtgaatgaagcgcctgcgcaagatttcctggcgttgtcgaccatggacacctccaatcctcgcaatcagccgcaacaggaacactcatgtgccgatgtggacacgcttcgctacgtgttttcgtgcttgctggactcggagcacttcgagatcctcaaggcgacggagctgttcctgctcaagaactttatgggactttcggtttcgctgcagctgcagctaacggatctgtttgcgacgcacgtcaagagactgttcctccactggaaccgcgacgttcgctactgcttctaccacatcctgctgtatttgacgtaccctggcaaccgcctggtacttggcgcccgatcggatgaagccctcatgggagcggaagcagctcggctgttcgagatccctgggcttgtgcgctccggcggcgccgcgagctgggacgcgtttgatgtcccgcttcagcagatagtgacgcgctacactcagatgacgaagcgtaggccgcgcgcccggcacacgacgtcctgggtggattcagtgccgtggaccatcgtgcagcgctctgtcaccgagtacaagacccacgtgaagacatacttcgcctacgcgcagcagatttcgatgcaccagcgcgtacccacccctgtcttctctgtcaaaagcggagaggacgtcccttccccagccgctgccgaccgacctcggcaagcggcagtactagcctgaacatagtctaggatagagtatcatgcgcaatgtccaagcaatgcaagcaagtagtatcactatcaacccatgcagcaacgttcgatcatcgaaaggcaactccactgttgcctttcggtggtcgcaccattagtccgaaaatccaccaatcgcagcaggcggttgctagccgctcatcacttcacttccgttgtgcccatgttcctgcgtcggactgcgcgcgcgttctcgaccgcctcggcaggccgccgcgtgctgtgctcgctgcagcagctgcgggatctcgacggcaaaggactcaagttccctctgcacccggcggagccgaagaaagcggagacgacgactgatgcgacgacgactgcgaagcctcgtcgccgtcgagacctgacggccactggcttcgttttcttcaacgagaagacgcagcaacctcgagcgtttatcaacaggttctttgagtggactggaccggtgcgtctagctctatttgagcgtattctgatggctctgtgaccttgagcaggtgcccgcacgccatgctggagctcgactttgacgacagcgacttcttctgcgaaggtttcatccactgcaaagttcacgccgcgttctttgaccccgacacaggcatctgtctgcaaggacccatttcctcgcgtaaagctctgcgggtgagagagaccatgagactcggggtagctgatcctaccagggctaaccaaaattcgtattcgatttcttggggacagggtctggatgaacttcgagtggagatcgacggtgacaatgtcgtgctgctggctgagcaggccaaggagaggttttcgtcgatgccctcttacgacagccaggagccggaggcgtacaagctcgagaaacagcgagagcttgcagaggctctttcaaagcggtcggagacgtcggagatcgaggcgatgcagcaacgtttgcacgagaaaaccatggcaagaatgaagcagttcgagcagaagcagagggaggcttttcgcaagcctaaggagtaaagggactgccaaatgcagctatcgcgaatcttggtgattgctgtcagctaggttaacatcaatgcagcagtattttatgccttacttgccacgagccaaagcgtcaggtcgctgccgatcttggctgaaagtaaatgtactcaagcagcaaacacacgcacttccaaagtgccgtttcaactcagacgaagctatcaatctggttacactgcaagatcgatttgaaaagcagcatagatactcgttgcatcaaagacggcgaccccaagcatcagtttgctggggttggagtgactcagctcgaagcagaaacagcagatcctggctgcatacgggggagtcgacaatcgctgcgtgtctgggcaacactgaagcccaagcagactgtaccacagcccaacccaagcagcccatgtgcaaggcaacttcaaccgcgcgacgccactcggagcaaaagaaacgaaggcgagccgctcgaatcgcgttggatctgcaaaatgtccccatgaaacgcgttcgtgcagtcaacgtcgtgcgcgctgttgcggatacaggaccgattcgattgctatgtggagatcgtgctcatgctacggcagccgtggaccgaagcgttgcggtgatttgagcccaaggagtgcacgcgcttgtactcgacaggcttccgtcttcaagttgctgtccgactcgcatgtcaatcggcggcactggagggtcaacctctgcttgacgcgaatgcgatggcgacggttgtacgtcgatgtggtacatgttaacacggtgtgtcgatccagacccaaacaaacaccaaccatttgacctcgcgcaagtatggctggccggtggccgggtcactggtcccgcttgcagttcggctcccggcggtgtgcgccacgctttgccttgccgagccagccaagcatgtctgcccgagtgatgtgcaaattgcaattcagcggatttgtctgtctctgtctacagtttgctaatgcgaccgactgtgcaggcaacataatgtcgctactgtgcccgtcttgaggacagacccatacaatgattcaacaaaggtttacgaaaaatacgggcacagcagtgcgtcttacttcaacctgtgtacgaactgtgtgcacgtacgtcggcgtgtcaacgctccaaatctttcactcaaagagctacgggaccacgcacgccgtccgattctcgccattctcactcttccctcctccagcagagacccccctagaagacaagacagccatggtcgccatcgcgaacgacaagaaggccagcaccggcggcgtcgtggccgcgcgcctgctcggctccacgtgctcgggcctgtgcgagctcatgatcttccacccggtcgacaccatcgccaagcgcctcatgaccaacaaggagcccgtgcgtgcccgcgctatcccccgctcggcactgtagatgatgatagtctcgctcacgctctcttgtatctcggtctgtctgtgtctgcagatgcacggcatggctggcctgaacaaggtcatcttccgcgacgcgtacgaaaagcccgtgttcgcgcgctaccgctcgctgttccccggcctgggcttcgccgccggctacaaggtgtcgcagcgcatctacaagttcggcggccagcccgtggtcaaggactacatgaccaagaaccacgcctcgttcttcgagcacacgttcggcgagcgcaacgccaagaccatgatgcacgccacggccggcagcctcatcggcatcggcgagatcgccctgctgcccctggacgtgctcaagatccgcgcgcagaccaaccccgccgctatcgctggcaagggcgtggcccacatcttcaagacggagggcttcgccctgtaccgtggcgcgggctggacggctgcgcgtaacgcgcccggctcgttcgccctgttcggtggatcggctctggccaaggagtacatcttccagctggaggactacaacagcgccacgttcttccagaacttcgtggcctccatctcgggtgcctccgccagtatcatcggtacgttattaaaacgtatttgcattattgtggatccttgctgacagtacttgtggtcaatgatgtgtgaatgtgcagtggcgcagcctcttgatgtgatcaagacgcgtatccagtcgcgtccgttcgactcgcccgagagcggcatgacggtcgtgcgcaacctgctgaagaccgagggccctggcgctctgttcaagggtttgatccccaagctgtccgtggtcggccccaagctggtgttctcgttcgctgtggcacagcatctgatcgcgcacttcgagaagtccttcacctagactttgactgtcaaacggcaccgccaccatgtgcagttgcgatgccaacccgcgggcgatagaagggggagagaagtcgagtgagctcgcacacacatggcgacacactcatgttgcagtgcgtgcagctgaccgtcttcgttctgctcgtgctcattttataaagacgcgctttgtttgttttgctggtgccttagcgtacgtttgcagctcgcatgtttggtgcaatggcattagctacgtatcttcgctctatgactatattaacgcttacttcaacacaacgctcagtagtgtgcggaccaggacgagcgtgacgccgccagcagcagtaacaatcgtgagcagcgcgaacgcaagtttccacttccaaagccttcgaggctgctgcgcgaaggcgtgctgcgggaagtaaagctgcagcaccgacgccagagactcgtgtcttcctaccggactgccatccggacgctctacgctcgtggtctccagcagaaactgagctcgcaatccgtagtgatcagacaagtgtgtgatcggcaactgaggctggcggcgacgaaggcggcgctggacatggtcgctctcgtcgctgaagtcttcggcctcgctgtcctcagtgagcccgtccaccttgcaatgatccaccgtcgtctccttatccacgatagtgaggcggaagcgtggcgagactaccgagtccaagctgccgcggtcttcttcgtcttcattggtactgtcggtactagtacttgtgctaggaggtgagactgctgcggcaggtgcctggtcgttgacgcccgggaagaagaacatgtagtcgatgcacttgccgtccttctcgggcgaaagcgggtccgtcttgtgcacaagcgaggagtggccatcgccgttggtgatcgggtggagctcatcgcccagtttagtggcgtcacaacgcttcatgaggtcgataagcaagggttctcccgtgtggtcggcatcaacggtcttccctgcttcacgtgcgacgttcaatctcgcctcgcgcaccacacgctcgaagtccgccacaagttgctggtacacgttactctctttacaccgcgtcgatatcgccatgccaaactgcgcgtcatggacgaggttgtgtcgtgcatccaggttgaagtcgcccgtgatgaggacggggacgcccgggtcgtctcggatcgttctgacgatgaagcggtgcatctcctggagctgcgcgagacggatggtgtactccttgcggttgtcacccgcttgggtgtgcgtggtgaacacatgcagcgagtccgacaggtccggcgatagctggatgcgggcgtagagcacacccttagcgcagattccgtcgctgccggagccctgcgagtacgcgagttggtcgcgttcgacgatcgggaagcggctgaggatcagcaggccgccgtcgatgaggcgggagtccagcagtcgcggccacacggagccgcaatggtaccggaagcccatggcgtaggcctctcgcacgaaccgcttctgccttggtccggcctcgaacatctcctggaggatcaccacgtcgaacttggcgatcttccggagcagcagcgccactcgcaggtctttgtagtcgccagactggaaccactggccgctgtggatgccctcggggcgacagaagatctgctcgaatgcatcaacagagctcagagtcggattccgtcccgagacttcaagcagcacttgagcacacaacgtaacgtacgttcatgctgagcacggcgagacgctcctgcaccttcgccatggccgtcaagccaacggaaatcaacggggacgagcaaggagagattcgacgcgctggagcgtggaggttcgattgtcccgggagatccctgcgactgccgacgaatggaagactgatgccgtttctgcagcaccgggctcggccgttacccggatcggtttggcagctttgggttggtcgaaaaggcgatttaaattcctggattggctaaaactcctcgcgggactcggcacatacgtggcgctcggtctccgctgcggcgtcaacggggactggcacatccagttgccgctgcaatgtggccagtgtacgctgggcctcgcagacttgagcttcgcgtgtctcggccagctcgcaatacttggccacgaaggacaattcctgccgcttggccgtgatctcggctcgcagctccttttggcgctgggtcagctgcgcctccgcgaacttgagctccccagcgacggcattcactgcgcgcgtctgctcgctttgatgctggatgaactccgccgtctccagctcctgctgggcctcaaacgcttcgatggcctcgacagtgtcgagcgtctccgatcctgaggacaaacaacagacagacaggcaaacgagaacgaagtcgcgaaagaaacttcgatgagcgagcaggatctgcaaccacaacaacaagaccaaactgcaggcagcttaccgacgacggtcatttcctggagcacggcgtcgatgtggcgctgtcgtgcgacttcttggttgcaaatcgctgctctctcggcgaggacagcgcggaggacgtgaggctgcacgtcttcttcccaggacagaatggagttgttgctgctgtcctcgctggtcggcagctcgggttcgtccatgttgaagtgcgcggtcgtcatgacagcctcagcatccacgcacagacccgccccatgccgagcgccatcgtgccagtgcccaatgtacttgtctccgagcgtgccaacgtaaatgccatacccactcgcgacgccgtcacagaattcgcccgagtacgtcgtcccattggtctgcagctccacacccgccccgtgcttcttgccatccgtcatagcacctgagtacgtagctccaaagaccgataggaggacacccgtgccgtcaggaacgccgtctgcagtagaatagcaacagttagtccagcatctaggaaggttaactccgttgcaagcaagaacgcaccgccattgacctctccgtggtacgtcgaccgatcggctagtgtcaccgtcgccaccttcacagttggagtcggttcttgagcctgagcttcaccctctccgcaatcctctataagggctttactagctcgggtagccacactcgaccccggtctgcttcggctgctgcgggcagaggcaaccgcttcacttgccacggagtacgtcgccatgtttgttgccttttggagcccaactctcactacactgcagtgtacgtcctttcgaggcacacctacacctctatctatggatgcacttcaacttgctggtactgatgatacgccattcattacccccgccgagttgcctgtcaaaggcaaataagaagccccaagcaccaaacaaaaagacggacaacaacaacggagactcacacggagatggcgaacaggaagcctgcgcgctcgcgagctaggtacgtagcagcagtagggaggtagtgggcgtgcgtgtgggatcccgaacgttgcagccgcgttgccgcgagtttcctccgacgtctgtgggctccgatatctccgtcttaacgccatgggctttgacttggcagatccgacgaggacgacgcgtttgggtggcaattgtaccacgaccggcagcgcaacttgctctactacctgcacagctacactggggaagtgcggtggcctcgcccggagaccgtgggcttcgtcatgcacggactcaagccgctgcctgcgcatgctgccgcaagggtcggcacagaccccagcgtcgtcaacccagacatttggagcccgtactacccgcatgtggtcatgctgccctccgggttgatgcaggtgcaccctggcccggggtcggagagccaaggcgcgacggagatgtggtgcgggtacaaccgcttccctcttgcgtactttggggccgctgcaggcagtggagactttgctggacagtctggggctgcaggaccggcggtcatgtcttcaggaccgagaacgctgccgcctacgtgggaggaatcgcctagtggctcgccattcctgcctccatacccggtggccattctcggacgtgacgatgcagagaacaagcggcaaacagctccaaggcccccgcttggccacatcgacgagcacttccacacgcccgcgaccgatgttccacgcagctaccagcaccttcagaccggcgagatggggcgagtacaagccgcgatggactggtcgatggtcactcctggaaacaccagcaccacgccgaccgcgccagcccccgatcgcaaacaaccaggtgagtactgtagttatatattcttgctcggacttgcttgtgcgtgaagttctgattgtccgctgtgcttgctgcgggtagcttacccgaagggatacccggcgccgaacactgcgccgaacacggagaagaaggagcacaaccgcaaggggtatctgctccgccaggcgcgcaagatgatgcgcgacagcagcgccagtgcagccactgcaacacccaccgcagtatccaagcagcgcaaggcgcaggaggtcccatcagccgccaagtcgagactcgatgcgccgctcgtccaggaagacaagcaggagcacttcaccccgtacggagactacgaggccatctcaccgctgcactgctaacgttagacgcgcggcaattcccaccaagtgagaaccaatctatttaccccccaggggggaggccacgcaggctcggggccatcgtgccgagccgccgacaccatccgacctgataattttgaattgaagtgagaccatacgcacctaaaccgtacttagcatccagccaagcaataatgctgcgacgagctctcgcggcgacgtgcggccctcggtactgacgcgctgctggcggctcctgcgagctaggggcgggttgcagactcaatgatgcactcacttgtgtgtcgctgtatgttgccgcagcgtttgccgcttgtcggcggtgcagacgcgagagaaaatcacggttccggcggcaggcggcgcagtgcggcgacgtcgtctcaagcccaagctgccccaggacaagtgagtcgctgactgaaaggcgcagaggagtttagacagctgcacagtcactggaagagcgctaatggcggtgggctacgtggtggaacaggttcacggcgctgtcgacggaattcctggaccgtgtgcagagtgcgatggagccgctccacccaccggtcaacgaggagttccagctcgaacgcgacaacagtgcgtgctccactcttgccatcctgttctggggtgtaccatgcatgctgggagttgtttcgtgctaatgttcgtgtgtgtacgaccaccggaatagatgccgaacttgttatccgcagcaacgacaaggagttcgtcatcaaagtgctgtctcccaagcagcagatcgagttcacgtctccggtgcgtaaggatgtggacatctcgttgttagggtctcgacttacagcaccttgtttgttcttcgtcgttgcaggtgtctggtttgcgcacataccaatggaatgggatgaccaagagatgggaggacgaggtaaagctgctctcctgatgaagtgtggttagcggtgctatacttactcggttgtgtggtttagaccgactcgcacgacattgaaggactcctcacccgcgacttgatgcgcttttgcgcgggaattccgctcttttagaccatttaccatcaaagcgaaggcaccgacgccgatggcacttctgcgaagcagctaaacaccgaatttacgcctccgtagacaacacatcgggcttgagtgaagacgttctactttacgagtgcccacgcaccaggcatttccatccttttgattttttttgtgtcgtttgagccttgcttgctgtgttcgctggaacctgagcctattactccagcgtcttcagtaagcggaacagcccggctgcttcgcgaatacgactaaactcgatacaaaaagcctgcacctcgatgatcaagtcctgagtaaagaaccaacggcaaaagagtaagtgaccccggccaaactagcgtcaggaccacaatgacaggttgcgggacgtacctgcacgttaatgatcttgttccggatcagcgactgcaggaacacacacacgaggcgcacaaggcggttctgcatgtacttgtccttgatgttctcgcacgaggaaatgcagttggaaatgtacaggtggatgaactccgtgggcaagtccactgccgttgtcaagcgattcacgacctccatcgagtgtagagacatatccatgttcaccagcgcggacaggtattctgtgatctggttggacgacatgagcttcagcaggcagtcgatggccagcatggggttgttttccactagatcgggcaacctctgtggcgttagtgaacagtgatacacgagcttcgggtccgcttcaagctccgcgagcaccttctgctgcagtgacgacactagcggtttctgaaatgcacgcagcatcagctcgcgcaacgcgatgccgtgtgtcgagtccagcatcgtcgagtcccacagcaccgtggggcagtagtccgggttcaaccaaatcaactcggtcatatctggctctagaatcggcggggggaggcgcatgaacgtcggctcgaagctcaacaacgacagcgatcccgtggacgatgcgctcgcagctgaactggatgcagcagcgggcgtactggtcgaggcctccgcttcgctaagcagactcatctcttccagcgaaagcgcctcaaagcacggcagattgagcgagctgacttcgttgggaggtacctgcaagttcgcgccattgttcacgtgctcctgcaggtcgaactccgtgtctgtcaccacattgcgaatgcctgctgcgcggaactgcggcacggacggcgtgcgctccaagtagctgtttcgcatcgcctccacatcgaactggactggctgcgacgggttcgctcgaaactcggccatcagctgcttggccgtctttttactcgactaaaaaaataccaacaaacaaatctgtcagtgtcctcccgaccaataaaaagatcttgaacagttcgtacttcacgcgtggcgccggtagccgacagcaggtgcacgatgaacttcttctcgcacaggtcgctgcccttctccagcgcgtccaggaacacgggcaggaacgggttggtcgttgtgccttcattgcggtacagatcgctcaaaatcgagaagctgacgatgcgctgaagatccgcaacaccagaagaagaagaagaagaaaaatgccacaacaagcaagagtcagcaccccgcctgcagtatttccagcaatcagcggctatatcgcatcgcctccgtcgccgcacctgggagctcgtgagcaggttgtcctgcagcaggatgcagatggtgcagcccactttgaagtggtcgttcttggtgaaggtgcgcaggaacacgctggccacctgctccagcggcttgtcgtcctcctgcagcaacattcggcaacagcaacacaaacagagcgtcatcagtctcgattagacaccacatgcgccatttctatcggagcaagagcgcccaatagcgccaggatatcgcagagcggacgctggcagctccgcgcccgctggctggctggtccatggagacgcacattgaggatggccaggagcggccgcagctctcggatctccagcatgggcggcaggggggaggggggggcgcggacggggacgcgggcggacgaagcttctctcctagtgcttgcgtgctttggtgcagggccttgtaatgggaggaggcggcggatgcgaacgtaaggcgtacttagtagtcgacaccagaagtgacacaatcatttccgtctgggttgacacacgagatcgagcgatggtggaatctgctgctgctgcgtctctgctggcccgcgtgcggccgtcgtgcgccgcgctggtggcgcgcgagtcctcggccgtgcgcgtgaatgcggacaaagtgcgcgtgttcgtggaggagctggacgccaaggagttcgagcagctcgccgagcccatgaacttcccgctcaacttccgctcgcagcaggacgaactcaacttcctcagtgcgttggggctcgaagcggcgtcgtgcaattggaggctgcaattctaatttttattgctgttgctgtgcagcgctctatgcgctgctgaacttcggcagcggattccgcaaggacctgcacaagtacgcggatcgcggagctcacgacaccatcgtaagtggatctttgtgctaactagagggtagtgcgggcaccgttaggctagtttgctgattgtattggtggtggcgttgctgtgcaggtgtttgggctgattggcatgtacatttcggtgcccaagctggatgcgcagttcatgaaaaacctgagcatcgacctggtggcgtcgtacttcagcatcccgctggagaaggacgaggaggtctctcccggtatctacatggctaagccggtgcgtgtgccaactcagagtacatgtgtgtaggatgtgtgttgtgtgcaaatgagttaatgatgatgctttggttgtcgcgtgctgtgtaccgatccagggaccattgaagccgctggctgtgatgctccagcaggtgagcgatgcccagcgaatctgccagtaacctttgcattttgagatctaacgctgtcggtatgtttttgttgtggttgactatagattctgaacgagtccggtcagaagctgcttgacctgaagatggatgatttcggtgcgttcgtcttggccaacctgtcaccgaaaagtgacgatgacttggaggagaaggaggctgttggccccagtgccaacgccacgtacctcggtgaccggtttgtggctacattcccgggcttcgacgaccactacgagctcgatggcgagaaagtatacctgctcaagcgcgcgcaattggccgtcgcgtgcattcaccgccggttcaaggtaagccagcgatttgtacatggcaagggttgcttcaacactctgattatttgtattcaatgctggacgacaggattccgacccgaagctgacgttcgctgacatcaacgagctcacggctttcagcgacaatgtgttgccgtgtgtgctgcatgctctgggtgttctggaggtacgtgttcaagaagttgcaacgtgatctttgctggttggtccctgtctaacaacaagtcccatggatcgatccacgataacagtacgacgcggagctggagggccgtatcaaccgcggcgaggagctgcctgccggccgtcaggactgcgagctgcgcgcagccgcgctggtggcctgcgaccagatcgtggaggcgagcaagggccgcatcaggaccctcgagctggacttctacctctggcgcgtgggcaaggaggagcggttccgcggcctcgagcgccacgccacgcgcgacacgttcttctactagttggtctacagcgatcagaacgagaggacaccgcgtcatatttgaagagcagtcatcgctttcgatcaccaaaaccgagttgttgctcctgttcacgttgcagtcctcggccggtcggcgagctcactccatgcagcataatttttccagcgcggctgactgcagatgctctcccgggcacttcaacacgctgcggctcggatttgcagctcgtgtgccaatgctcgctccgctcggccctgagacgacggccgccgcgcctgcaaacacgcgcaacgcgccacatcaggcgccgccagcagggcgagcaagcgacggcggcgcggagcccgggacggcgcgaaaagtatcgcaactcagcagcgccgcgcccaagccttcccgaatcttctcgtctccttttctctgcccagcagcaagatgggtacccgcgcttcacttgcctccactatgcggcgagcgctcggagcatgcagaaacgagtcccgccgcagccggccgccgttaccatggcccgaggcgctcctcgcgcttccctcactcgggcatttgcggcaagaagagagggggcctccgttgctgcgctgcgtggatcgagagcctacagtaccgtacaggggctgacactgctgcatcaagtggagggagaatcaggtcgcaattcaatccaacccgctcgtcgtcggcgtacggtatcagaatttcagcgtgttgtcaatcgcctgagcggtagcggcctcttctcctccatccaccacctctggttatcaactctacctagtgcataatgggcgatgtgggcgtcatgcatcgcggactcgcgtggtcggcggagctcaccaagaacattcccattcccagtccggaccgtcgagcagcgctggcggcggaagtcacgagggttcctggactgccactgcggcaacgatcgctcggcgcgatgcccggcttggcgcgctatcgctccgactcggcggctaccgagccgcggctcagtgtgtgcagcacgtcgggcaccgtctacgagagcgttgtggtcgtcgggcacatgaacggctcggacaacgtcgtgtactacctgctggaggtgcggtcgtgggagatgccgctcgagggctacgtggtgcggcgccgctacaacgacttccgcaagttccaccacgagctggccaagtgcatgccctcgcagcggccgcgcagcagcaccagcgcggggctctactactcgtcgctgctgtgcaatcctctgacacgggcgacgcccgagacctcgccgctttggtcgcccgcgaggacggatgacagacgcgcggccaatggctcggaccagcggacgtggatcagtgaagaagacgacatccagcacgtggaggagagcgacacaaggagcaacgcgcccacagctgtgaccgaagctggttcgtcgagctacaacaacaacgcggtgctgccgctggatgccgtcaagttcaacctcgcaggacgcccgtggctgcctccgatgcccagcggcggcgtgctcaccatgttcagcacccgacacgcgctcatcaactaccgcatcgagcagttcaaccacatcctggcagccgtgatgagcgacaagtcgagtgacgtggcgaggctgctcatgaacttcatccaggagaagccaggcacgcaggcccagacgtacacgaacctgtccgagtacgcccccatcgacatcccattcaatgtggagcggtacgcgcggcggcgggccatgtccatgggcaagcggcaactgcgagatcaaatgtcctcgcccgtgccttgaccagcccggaccaatagtggatagattagctgtgtaatgtatgaatgagcgctcggatctcttgaggtgtgtagccattgtcccccctgatgtattagcaagtacgtggcacttcaactagcaaaagtatccattgaggccagccgttgcctgccacatgacggatgaattgggttcggaatccgctccatgggtagagctcattagcgcatcggacgtgcaggaggcaagcgatgatcttcccgctgttattgatctggacggccagtctgcaggcttgcgccgtgcttggaagcgacgcgtacaatgtgatcgtggtggggtctggtcctggcggactggtggcggccgagtatctgacgcggcagtcggacgtctcggtgcttctgctcgaggctggcaacgtgtcgctgcagagcactgggggctccgacgtgctctcgtactcagcgtccgagggctggaccacgttcgatatccctggagagttcgacaacaccatctacaacgccgagaacgaggagtaccgagccgactggatcaacctgtcgtccgtgtggcttggcaaactgctcggcggctgctcgtccatcaacgccgtgcagtacttccgtacgcccgactcctacgtaaccaaggcctcgtggccattcagtgccgacgtggtgaacagcggcttcgatgcgatcgaggagctgtccccatacacggagacgccgtctgctgacggtgaatactacctacaggaggcgtttgacatcgtcagctccgcgctgggaggtgcggggtacgccttcaagacgctgaacaacgaggaagcccggaatggtaagaacagcacgtacggccacccgccgtacacgatcaagggtggattgaggaactccccggccaagacgttccactccgagatggagggacgaagcaacttcaaactgctcgtgaactcgaaggcactgtacatccagcagacgcaaggcaacgccactggggtcgtgtaccagaacgaggcaggagactcggtcgaggtgccgttgaccgaaaggggtgtcgtggtggttgcagctggagcgctggccacgccgcagcttctgatgcagagtggaattgggcctcaggatcagcttgaggcgcttgccgcgacggggtcatttgatggggttggcggccaggacgcgtgggtggtcaacaaggctgtgggcaagtctgttttcgacgctgcggtggtgtacgcctccttcacgcacgctgggatggtgccgttcctgaataccaaacgaccggaagacgccatcgcacagttcgtgaagaaccaaactgggccgtgggctatccccggtccggtgttgacagcctacgagaccatggagatcggcggccgagagtacgagctccagacgacggtgcttcctcacgggtttggcgacgcttacgagacggaggaagcgtacacgctcgcgttgttgctcaacaatccggagtcgcgagactatataagtgtggacggaaatgcgttcaacgtggcgaccaacggatcttggtatctgtcgactccgggcgacgttgaggccatggaggcgtacgctgccaggatgatctccaccatgacagacgccgggtccgtattcctcggcggcgcctctagtagtggggaggtggatatcgcaacctgggtctccgataacgctggtagtgtgagccaccactttgggggaagctgctacacagcggcggatactgcggacgatgcttcgcgatgcgcggacgcatcgtttcgagtcattggcacccagaacgtctacatcagcgacgccagcctcatgaaggaggggacggtcaacccgtacgccttcgtgatgtacattgggcaccaggccgccaagaacgtgctcgacgcggcgttcggcgtcagcgccgacgcggacctgaagacgaccgggtcgtcgagtggcaacattgatagcgacagcagcgcggccaggagactgtcgggtgcgaccatcggttctgtcgtcgctcttcttgttgttgcattaatcgcgctgtgattaactcgctctgagagatatcctacccaaagatattgccagagctcgctccagtacatgtattattttgcgcgccaaacccactgctgctgcctttggcatccacataaccacagatgccagtgctggagatgaccttgaagtttggtggtctcgccatccgattgccgggaacaatacacactggtcggatattgtatgggttcaccgccgtggtcatggtcgctcgcggacacgttacgccaccttgcccgtatcgcagcctcgccatcgaaatgagcctgctccgcacgcgtgcttcggcagacgcggctgggccccccagcctgcggtctacaacatgagcggctcatgtttcctcgcgttggcgaagacatggctcaactatgtactacacaggcggtgccactgaacaggtggaccagacattcagataatcctctattgaataattcatagagacacaaagacctcttttatgcagttttcagagagatattcctatttggaggtcataattgtagagcattcaaacaaaactgaaattgacatcgattcacgtggggcaataaaagaacgtaaatgtactccagcttgatgtcgcactggctgcagcaaaaacttactctgccttggctacaacagcaccgaatatgctccaaatatgctgttctaaacgttgctaacctcttgcgacgccgtcatcttgatcggaaggagcagtgcgcttcgggggaggaggttgtcgatcaccgcaactgttgttgaagtctagttggctagccaatttatctttatcatacgccgcgggcgatcattgtaacggggttacatggaatagtgaccctgtcactattccgggatggctacatcggtcactcccctggatagtgacccaagtggcctcagagccaacagatacaatttgtatgacacaaactatagggaacttaggatttgtatgcaggccaaatctgtaccaacctataaatacattcagtcttagatctaccgcttttcaagtcaagtcgtccccttcagaccagggacacgtgaacggctgttcacttggagtttgtatactcctgcttcctctgttaagaagtgctgtgtgccccgtcacacttggtagcacttgttgtcaatcctacgcctacgcgggtagattggactacctgaatcctctgtggtctcatcgagtgagccaagatgggttgtacggagtttcccgatctgaacgactcgcagtacgagtccgttcgtaagatggcaggcatctttgggacagatgccctgcgtagcttagcggcggcgacgccggctgagcaggttgagcgtatcaacgcgttcgacacctacgagcgagggctcatcgcccacgttcaagggctgcaggccactgcggccgcgctgaagccggtgtaaccgaagcccctgcggctgaaggttcaccccttcgaagggaaggaaggagaaaacattcacttctgggttcgagaggttgagctcgcgatggacgcggctctcgtctcggacgagcgactccgtgtcgcctttgcgctctccaaccttagtggtcgcgctaagagttgggcgtatacgcgcgaagcgacgacgcctggatgtttcgcatcatggtcccagctgtgcgagcagctgcgggccgcgtttcttccggcgaactacgagtaccgccagcgttcgcgcttcctcgcctgcaaacaaggaatgcgcgagctgcatgagtacatccaggagatgcgagtgctcactgcctctttggtgtagaaccccctgcctgaacacatcaaggtgaccgtgttcatggacggtctgcgtgtcggtcctgcccgcacgcaactgttccgtgtgcaagcaaacactatggaggaggcgattcagatcgccctccaggaggagtacagccacaagcaggctcgtacccccgccacggtatggcagagtaaccctgcctctggcggtgcgcctaatggtaactccggcaatggagcgatcaacgggccggttcccatggatctgggcatggccgagcagagcgacattcgttgctacggctgtggcaagcttgggcacatgaaacgtgcttgtcccgcgggaggactgaagaagaagctctcttcgaagccctttggctctagagagtctcggtactctcgaagcggagaagggcagcggtgggctgcttgtggtgcacgcgagtgtaccgggatacgatcatctcttgagaatcttgatcgactctggggcgtccaagaactttgcgtgccgccagactgtcgcacgcaatcgcgacaagtacgccgatgcgctacgaggcagcaaaggcaacgggctggtctcggtaagactggccgacggtacggtggtagaagtacctcgggtccacatggacctcactgtcaagttcgaggacttcgacagcacggagccgttcttggtcctagacatggacaagtacgacttgatccttggcatgcagtggctggagaaacacgagccttggatcgactggcgcggcaaggccatcggggccagccgtcccccacgctctgacagagctttggtgagtcatgttcccacctctggcagcagctggggcgcccgcgagggccgccagggcgcagcagcgtctaatgagttcttggggtccgtcgagactgacgacgactccgaccgggccggacaaggcctgagagtggaggtgccggacagcacctaccaggtgggtaacgtaggtccacacgcgggtaacgaagtaccgcaggcagcaagggctgcaggagaaggcgccgctggcgttggcgtgggtaaccaagttccacgcgaggtcactcagatcgtaactgatgaggaatgcactgcaggcgcttccgatgtgggtaacatagttccacaggaggtcactcagaccataactgatgcgggagtcgctgaaagcgctcctggtgtgggtaaccaagttccacacggcgaggtgggtaacatagttccacccagcaaggcgggtaaccaagttccgctcaaggacaaggcgggtaacgtagttccgcacgagatcgagaagatcggtggtggcgccacgagacgaagacacccgagggtcacgtcgtaagccgggcctagtcgtgtggccgacgacgccagtcgccagcgactccgagcctccagccaaggctccagccgccgaagagtgttatcacatcttcgacggcgtgaccggtagtcgggtcaagacaggagctgtcgagcttacagctctgcccgaggtttcagagttgctgaaccttgaggagctcgccatggaggacttcttggccgagctaaaggccggggagatcgcagagttggttctcctccgaccggagtccacgtcggccgagttgaactcgtcctcggtcatggaccaggcagtcctggaggagttccagagacggcgcgtgtcgcgcatgggctctgagattcttaagaacccccgggacccggtgtaccccttggtgaagaagtttgaggacgtggtgtccaaggatccaccgtccaatctccctccggacagggggatcaggcacgagatcgatctcgtgccgggcacgaagtactgtgtcacgaggcaatggcctcttccccgggagcagtgtgaagtcattgatgccttctttgccgccaaggcgaaggcaggcatggtgctggagttgaagtccccgcactcgacgcctaccttctgtgttcgcaaaccgaacggaaagtggcgtctggttcatgcttataacaagctgaacagcgcgacagtgcctgcgcagacaccgatcccgcgcaaggacgtgttgctcaacaacatggccggctgcacgctgtatagcgcgctggacctggtggacggatactaccagatcctgatgcgcgagagcgacatcccactcatggctgtgagcacgccgagcggtatgctctgggagtggctggtcatgcctcaggggctttctaacgccctggcaacgttcaatcgcttggtcacacaactgttccgacctttgcgtgcgttcacacagacgtactttgacgacatctttgtccacagccgtgccgaggcaggccagacggccatggaggtgcatctccagcaccttcgacgtgtgttcgaagtcatgcgggcgaacaagctgtacgccaacaccgacaagtgtgtgttcgcagctgaggagatcaaggtcctgggctgcttcgtcagcagcagcgccgggatccgcgcggacccagagaaggtgaaggtcatcgcggcttggtcgccgcagaaggacctacaacagtggttgggcctggccaagtatttgcacaagtactgtgctgctacgccgggctggcacagctattgtcggatctcctgaagaaggatgtcgactggcgctgggagcgtcgccatcaagatgcttttaacgacatcaaagcgagcttacagcgcgcgccagtcctggcattgccggacgagacgaagcctttcagcgtagtctgtgatgcgtctgactacgcaattggctgtgcgctattgcaggccggcgatgaaggccgcgaacgggtcatctcgttccagtccaggcagctcaaggcagccgaacggaactatccagtccacgacaaggagctacttgccatgaagtacgctcttgtcaagttccgagtgcacctcctgggctcgacgccctttgtcgtttatacagatcacgcgtccttgcggactgccgtcaacacgccgcatctctcacagcggatggcgcgttggctgtcattcttcgcggaatacaacttccgtgtcgagtacaagccgggcaagttgaacgtgcttgccgacgcgctgtcgcgccgacccgactacgagcttgctcatattagtcgggtcacgacggatctggatgatcgcatcaggctggggtaccgagacgatgccagtctcgaacctcttgtgcggttcttggccgctggctcggaagccaaggccgagtggctcacgccccgacaacgtgcaaggctgcaccgctatgagtgggctgacggtttgctccactaaagggtcgagcccgaggatcctccctgtattgccgtgcccaacgacgaggatctcaagtacgacatcctgatggaggcgcacgacgctccatccagtggccatctcggccgtgagaagacgtacgcgtctgtctcgcagatgttttggtggcgtcacatgtacaagtggatcgccacctacgtccgtacgtgcgagacgtgccagcgcgtgaagcctgccggtcacgcctcggcaccattgcagagcctgccggtcccagcggactgctggaagtcgatgagtctcgactttgtcttcggacttccggccgatgaccgtggcaacactggtgttgttgccttcgtgtgccgtctgagcaagatggtccactttgctccagttcgtgacaccgtcactggcgacgaggtcgctcgcctgttcatgggctgtgtcttccgacaccacggtctgcccgagaccattgtctctgatcgagacctgcggttcaccgctacgttctggcagacgatgtttcgccttctcggcacacgactacggtggaccacccgccgacggatggccagacggagcgcgtcaatcgcgtgctcgaagacacgctccgcagtatctgcgcggagatgccccgctcttgggctgatcgcttgcctatggttgagttcgcactcatcaatgcggtacatgcatcgacgggctttacgcccttttacctgaacgggttgcgtcaccctcaggtgccgctcacattacgaggcagtaccggggcttcggtcctaagtgggggagaggctcggaaaaccttttcctcccaagtctcggacgtgagtccagccaccttgcggaagcaactgtcctcgtttgccgaagacaggctgaacataatcagcagggtgcgagacgccatggcgcaagcccaagataaacagaaggagtactctgaccaaatggaagaaacatgaacgtgtttaaggttggggatttagttctcctagatactagaaacctaccgctaaacactgttagctcggtcaagagcaacaagctgaagcaccgcttcattggacccttcacggtcctcagccggcatggcgcggcgtacaccatagacttgcccaagtcgatgacgactcacccgacgttttacatgggtcgtcttaagaggtaccatgaccctctggctctggctgccccgcaggaagcggtgggtggcccggtggagaagagcgcagctcctcgaagcgcggcgtcgagtcgcggtaaggcgcctgatacgcgcgctggtcgtaagacggcgcggcgtacatcggagcagcatacgcaggggccccatacgagccctggccaaactgggcctgatacgagtggggcagctgctgctccggatacggcgcgtggccatgaagctcggcccgaaggccagcgagctggtttcgcagcgagtcataagacgacaggtcggctcgacgatccccacggccatggagactgcgagtttcttgatagagcgaggcaacatcctcacggagccgctccacggcaccaaactgaccagcacgagcggcagcctcgccaccaaggccgacgccaagcgcgatctcgaggacgtacacacggtcccggagaagacgaatctcctcttgctgcagggccaccacctgactcggggccccagcatacggctgcgtcgcctcaggctcggagccatggccgtgcgaggctaccgccggccctccttgatcgtaatgggcagatccactaccacgtggaacgagtcgtccgggcgcggcggctccatggcaagcgccagctgctcgtgaagtggaggggttaccctgagtcggataactcgtgggagcctgttgagcagctccaggcagactgcccgaaggctgttgcgatatgggacgagaagcagcggcagcttcgtaagtagtccttggcttcttggccggtacccggggtacggtagcaggtagtcgcaccacgcccacgctcttcacgagctttggctctcgcctcttgctacagctcgtccattttcgagtggagcttgcgcttgctcacgagttgaccgaactcgatgcggagctcgcgcacgtccaggattgcggacagagtgcgatcctcacggagttctttgaactcttggtcggaataccctttgcgctggacggagcgccagaagaggtcttccacctcgctccaggtcatgttgtcattcggcttgacccagtggaaaccccacacaggatggagtccaccgttgtcctccggcttcttgcgaagcgtggtgaactccttcagtgtgagcttgtgtggtgctagtagcactcaccgggcgacttcaacgtcgccaagaaagagtggccctttctcaacaagagcacgctcataggaacccctcgaggtttacccgccgataaggccacgaggagccgagagcttctccaacagcgctggcgcgccagtgccaggctcgggcgggaagtagccctgtggatacgtggcatccccgcctgaagaagactcgatggcagtcgctgcagtcagctgcctggcatacgcgcccgagctagcagcgtggtattgctgctgctgctcgtcgaggttgttggagagctccttgggctcgtggacggcaccctcctcgtcctcagactccgagtcgatgaacggcttggagctggagccgcgaggcgacctggaagctgaacgcttcttcgccttggcctcggcggccttcgcagcggcagccgctttcgacgctaggacacgctcacgaccttgtgccagcgtcagatgcttggatgccagcaccgccttgggcttggagcccgcgtcgctcggcgacttctcggccacgaccccagcgtcggccatggcgacttcgtcgtgcgactgcttgctgtcgcctgagccagactcggcgtcctccgcctccttctctgacgaggcctttgcgtcggccgaggcgttggtcatgtcgcctgccgccagctccgtgccttcggcagcgtgcgtgctgccctctgagacgttctcgtcgtcgggtgaactctcaccggagtactggaccatcgtgcagtcaaagacgacggcttcccagccgcgagccgggcttttatggccccgaggactctcctccttgccttgcgcggcgtcaggagacttgctccgagccccggcctgacggccactctccggcgtgctgctacgagagcgcaccaccgcctcggccgccttcgtggcctccatcagcgcggacgactcgtccttggccttggccgccctggtcttcggccctacggcccgcggtttcggaggtgctttcgcactgcgcgcactgcgctttggaggcatgctttcggtcgacgtggagaccctgtggcttgctcggcgatgcgccagttgctctgtgaggcccgggagccgaggcgccagagctcgcgccgttgtcgatggatttcgactttgcgagtgaaatgtgagtcgccggcgtaacctcgctctgattggtcgataagatcgaatctaagtgggggaggatgtaacggggttacatggaatagtgaccctgtcactattccgggatggctacatcggtcactcccctggttagtgacccaagtggcctcagagccaacagatacattttgtatgacacaaactatagggaacttaggatttgtatgcaggccaaatctgtaccaacctataaatacattcagtcttagatctaccgcttttcaagtcaagtcgtccccttcagaccagggacacgtgaacggctgttcacttggagtttgtatactcctgcttcctctgttaagaagtgctgagtgccccgtcacaatcatcgagttggtccatttgcttctgcgacctccccaccttgcgcggtggcgatatatactctgcgctgcgcccagttgtatattgggtggaaatatataataacttgtagtaatcagtttcgccttcaccggcgtcaatgctcttatagcgccgacaaaacctccacaccattttcaaactacactccggtcagatctatgacctaacatgtattatgctttgcagaagttttgccggtccgatttagtggttaaatcgatctagcaacacaaacgaagtgaggtcataaaaatgcgagtcatcacaaatcctgcactaaatcgggcgcctactgggccaatgtcctgctcgatttattagcctcatatctgccacccgatcagcaacgggtacaccaacaacaacgcgtgtatcggcgcctactgcttcacaaatagtgctctgtttgctgcgtgctgtagctcaatagcttcatctcttccagtagaagaagctccggccacctgcagcgcgacagcaccgtccttgtggacctgcctgctaccccaaagtacgtatgactgtaagttactatgcctaatcaaaatgcgagttgtcggcgcctactgcttcactaatactgctctgtttgctgcgtgcgattaggcagctacttgccgatttagagtctctgtagaaggtccagaatgggcgtgcctcgcgctggtgtcttgccacaagattctcagctccgcggtgtggtaattttccgaaccggcgagcgctccagaagcccccgtaagggcattcggaagagccttacgtttgttgttgcagcggggttcgacgtcgcccgggctaaaatctttcgactgttgcctggagcggagtttgggcccaatcctagtgcaatcgaggctaccaaaaatgcacggcagaaggacttcaagattctttccgttagcaatttggaggagctgttgaagcgtcgatgggcgtgcattaccgacgatgacatcgtggctctggcatccaacgaggagccaattaatacgcagtttgcgtttgaatttttcgtctatctcgccccggtggtatggcctactgatgggattcgtcgggccacggcggatcgagttcgtgccgcggcagcggagatcgtgactttacaggcagaaggtagagagcggttcgtaccaattgccactcaccatttagctatccaccgcgcccgccaacctgaaggcactccgtttgcgattcctgaggacaatacgatgcaacaagcaagagctctagatgcagtggtagcagcgttggaggatactgctgccgaactggaggaagatgtcgtggaaattgaagtcaagctctttggcacgtgggtgaagatgcgcgtgaagcgctcgaccctacgagaagcggtgggcctcccccaacacgacatctttaccagagggattttccacggttttcgccccgaagccatgatgccacaaggtgaagacgtcccggatgaagaccaccaaatgtctgaaaactaaacagaggcagttcttgttaggtaatacagaagcttcaacgttcataaaactattgttcatcgtcactattagtttcgtgctggggttgtacaataaactcggaagatcggagtttcttgtcatcgtagccacagtgcgcatatagatttaatacgcccttccgtttgcttgggtggtgacttcgacagcaggaacgcatcgccacatccagcaccaaagctgggtacagcggaaagatgagatttgccttcttctggatccagcacttgagtagtccaaaacaaacctcgattgggtttaattgaggtgagtacggcggaaggtagagcagcctcgctccagcttggtggatgacctgtaaaaaaacaaaacataaaatatttttgtcagcttaaaaaaatgttaaagctatcaaactgacttaccggttctagctctcgatacatgtgaatttttgcgttgtccattacaactattgaacgtggcagcggtcaggggttcagaagaggtaagattttttcaacaaacgctttatgaaaggagtttctggagtaagtaccctcagtatagtcccaagcgacaaatccactatggtccaaagctgccaaaatagacaaccacttaccgcgactgaaaggtaaccgtaccaccgcctttgtattcttttttgaccacgcgtatcgccgataggcgtgatgcccatcttttgcggtttcgtcaataaagagcaattgctctgggtaagaatacatagcccttaacttcaccttgtacgcatgcacttcgtgcagcacacactctcttgccgctttggttagcacgtttctagtcaagttcatatcaaaatataaagctctacaaatggtactcagtgaaacatttttcaccatagggaagttgcgcttcataaagtcctgtagctcctctaaatagaatgtgggatagtgctcaacatacttccgcacacgctccactacgtcacacggccaccgtgacgagcgggtggttcggtcgtcatcttctaccattcccttagataagaacaaagaatctctgtatagttctcacactaggtccaaatatatcacttacgtactggagggagatgccatacacatgaacaagaaagacagcgcgccagcggaagtcgtgagagtacattgcgcaattatgcaggagaggagatgttcgagactgacggaaattgtggcgattggtcctgtccagtaggtagtgtccgatacaatttgcccctttctcattcaaaaaatgagtaatatgcgctattaggatggaacatcactgttcaccgatttacaataaaacgatccgaattgcgtttttctaccggcaaatcgggcagctacaaaataaatctgcgtggtgctctatacaaaccaaggtacaacttgatcgagttgcattttttatgaagagctccggatttaagcaattcgagcatgattataagtcaaaacgacaaaacgcttgcaaagcacaatacagtatgtggtcttttattttatggtaggcgtgcaggttgcaagatttgcaactggtgcatgtgcctgaaacggggttcaggtgaactgtgggcgatgagaacacaaataggagtccaagtgggtaccaagtcactggtacaccccgtgattagaatccccttattcaagaatgtacagtcgatataacaatagaggggatcatccgtatcgacccagctgttgccgaacagccagtttgctgagcgagtcgctcttggcgcgtggagcactcgagcctctcctcttcctgccattagcaaacccactcgctgtgcccttcccggaaaaattcggcccaggtgctgatcgccgcagtgccccctgctgcttatttcgccagttgctgagaccttagcgctcaccggttgcccccccctcttccctttgcagtgagcgacctcgtcggacgctagcgcacactttcacgtcgtgaccagcgacgtatcaacccccacacccgagcaacatgttgggccgcaacgtttgcctcgccgccttgatcgccggtgagttagttggttcttttcggtgtttgctgatgacggactcggaggtgctgacactcgttgtgatcacttggaacagtcgccgtgcaggtaacggcggtgcactcggcggtggcggcctcgtcctccatctgcagcaaggccgaggagtgctacgtgaacgggtcgtcgtccaaggtctgcaaccgcacggagaagaaatgcaaccgctgcctggttgaggccgacagcgactcgatctggaccacgatcggggcctggaccgagtacagctgctacgcctacgacgacgatggagagtgtccgagcggcacgaccgagtgtcctgccagtacgtgtggcgtcgtggaacagaggctgtcgtaggcgattgactgactgactgagtatgtgtgtatttgtcgtgcagcgctcacgaagtccagcgacgacgaagagagcgacacgggatccgcggaggccggaagctcggacgagagctcaaagtccaagtccaagtcaacgtccagttctaccaagaagaaggcctcttcgtcctccagcagcgactctgacgagtcgacgagcaccagcagctcaaccaagaagaagaagaccaccacgacctcctcctcgtccagtgactcgtccagcagctccgatacgcccaagaccacgaagccgaccaccaaaaagacgacgaagccggctacgaaggcgccgtcctcatcgagtagcgatgactcggctggatatgcgtccagtgactcggacaacgagtccgccagctcgtccgcatccgcatcttcctctgcgtctggaggcgctaactccacacagaaaacgtctatcgagagctctgcatcgagtgagcttcaccccaaagccaacagtgtgagcaccacgacggatccgacttcgtcgaccaccaccaaatccgagacggcggactcggcaaacgacaacagctcgaaggcgtccaacactgcgagtgccgacagcagctcgggcgggaccaacatgggcttgattctcggcatcgtaggaggcgcggtcgcgttggtcgccgtcgcgggctttgtcatctggaagaagaagcaggacgacgaggacttggacgacgaggactccgccttctcgcctaacaagccggccaccgctcgtgccatgaccgctccgccctccgcgtcatcggcaaccacggcgtacgcagctcagtccaactacaatgacaacaactacgacaactatggtaactatggtaacaacaactatggtaacaacaactatggcaacgtcaacaactacagcagcaactacggcgacagcggctacagcaacaactacgccagcaccgcaacgtcgacgcagtacgctgctggggcgggagcggctgggatggtgcctgccagctacggcagcccgtcctcgatcgacatcgacgccgagaacgagatccgtcgcactgacagcattctgggcggcacgggcgtgatggcgagcaccatttcgagcgagcagaccccgttcgagttcagcggcggccccagcccggacgacagccacgacgtctggggcaacgaggcgagcagcttcaagcagaagcgcacggcgagcaacgtgtccgtggagttttaggaggcaggtatgtaactccgctcggcggactcaagaaggtagggtgcgtgttttgtctatgagttaaggaatgtatcacgcacttggcattcagagttgggttggtgggtcacttggaggctctatttgatcttgtgtcatgaaagtatctctgtacatctaccatgtcgatcgggcaggaaggaagacttgacttgtcttggctagctagctgctcagttgtcgagcgtgtagagggagaacgcgagctgcgagccgaagcctgcagcgaagcgaagtgcgtacttgtgcacgtaggcgccgcccggcgcaaggcgaagcggagtctcgcccaggttcgggtcgtgcgtcacgaagtgcaccacaggcggcacgcagccgcggcgaaggccctcgatagcggcgacgtcctcgaaggcgacggccatggggtggcccgtgatgcccttggtgttcgcgatcatcagctctccgagcagctccgaaccgaacgccgtgcgcaacgccgtcacttccgtgtaggcgcacgacgacttggccgacgcgttggtgccggtctcgtggctgtagtacacgccgttgcgagcgatcttctcgcgggtgatgccgaagtcggtctccacgcgctgcaggaagcgcacgagctcctgtccaacgtggttcggctccaacgcagctccgtggtaggccgagttgctgtactgcgtcgcaagcaagcgcacgggcttcttgcttgctgtcaccgagcgctccgcgtaagccaggggcgattccagcaccacaccgatcgcgccgctgccgacaatcataccactacgcttggcgtcaaacggacgcgccgctgcatccgccgtcggagcaatgcacgcggcaccaagagctcggaaaccaccaccgatcaggggcatcatggtctccgagctagccgtgtcgctggacacgacgatcacacgctggcacttgcccgagctgatccagtcctgggcgacgccaatagcttgggtggcaccagcacacgccgcgttgatctgcgtgttgggtccgcgagcaccggtgagctgagccacctgcgcgttagcgagtaccaggagccggaaaaggatcttgcggtccatctcataggcagactcgccctccttgccctcttcgtaagaacgagatatttccgacacggcagcgttcatcgtagggaaggacgtggcgtagatgacgcctgtcgagtccctcatgttctccggcaaacgccagttgctatcggctccgtccacgagaccagcgttacgaacagcctccaggccggcagccacagccaactgcgtgggctcgtccatcgagcgggcgatggtcgcagcaataccgtagtccttctccagatcaacgtgattcacaactgctgagacttggatgcacttctcacgggtggacactggggtgagcgtcatttcgccgctagtcttgtccttatggacctgcacgatgttctgggcgatcatcttgtccttagcggcgtcggtgactggactgatgcagttctctccagccagcaacttctcaacagactgctcgccctcgaaagccttggcctgacccggcagaccaacgcttgtaccagtcacgtacacagctccagcgagctcctgcgcagtcctcgtaacgtgctgctgctcctgcttgtcgccctccgaagtcactagcggcttagagcgagcgtagaaacggcggcccatgtcatcgatccggtcaagatagaagtcgccttcaggaatggacgcaatcgactgcgtgagcttcagaccgttcttggcgccataggttctctgacgcaacttcatgcgggccgtgtattcctccggcgtcttcttgttgcggctttccagacgagcggtgaggtccagcgccttggcaatcttttccagcgagaacttgcccttcgacgactccgtcggctcacgcgtgcgaagcacaaacatggtggcaaggctacccgagccgtacgagaacataagcacacgcgccccgagggacagatccttggcacgagcgtgcaccaacgtcgccaggttcatgtagacggccgcagtgtagcagttacccagctgctgcgaggtggtgcagctcggccccaccttggtcttaaagtcttccttggcaacagcacgcaccgccagatccagttcgcggtcgttcagcgtgtcttccagcggcgcgtccgcccacttgctcagcgaagcaaacttctctttggcaacctcgtcgttctcactcagcactcgtctcgcgtccaagaacagcagccgagcgaacgacttctgcaccagtttgttgtacggcgagtggaacactgcgtagtcgaccgagtcaacgccagggcccttgccttcggccttgccactcttcttgcaaaagagctggtagcactcgtccagcgcgtgtagatagcacgagttagacagcttgccgtccaccgtcgggtactcgctgctcacattgggcttgtagaagtcccagacgttggtcgcgtgggtcgccttggtcgtgcagtccagcgccatgggtgcatccggtccgatgagcatcgccacggctccgcatcctccactgggacgagcggggcccttcgcgtacactgcaatgtccgtagccaccacaacggcgtatcttccgtcccagaaggagctgtcgacccaggccacggcgttcagcagcgccgcggtgccgccgtagcaggcgttgatgaccgtggctccgtccacatcggcgttgtctccgaacagctgcatgaggacggtcttggtggacttgctcttgtccaccagcgtctccgtgcccacctccagacgtccaacttgctcgggggacacgccgaacttgctcaggagcctggacactgcagtcagcgccagcgcgttcacgtcctctcggtcgccgggcaccgccatgcccagctggcccaggcccagagtgtacttgccgctgctgacgccatcgaatgcctccatctcctgctggtccacatagtccgaggggaaatgcacctccatggccaggatgcccacgtcgctgggccgtgcagagctcaccattgctgcggggtctgtttgtcgctgttgctgcctcttgcgatcttcttgtgctgtgccggctacggagcgagtggctactgtcggagcgcgacgctgcgaacgacgacggacggacctctcgttcgcgtccggcctgtccgcagaatgagacctccgatctgcgcgtacgtacgtgccgtgggattagtgtgcaccacacacataactgcgcgtagtgatagaccactttttatcactatccagaggcatcactacggcatctagatctgtaccacaacgacggtacaatatcgttcaaggtacaaatgcagttgataatgcgtattggtgagcttgtattgcactcgatatgtgatcaaagcactaggtaaaagtatttgttgcgctggacattattggggcaaagccccccctataccgtacctcacagaaagaatggttaacagatagaatgccaaatcaagattttcgagcatttggtttcgtttgatagcggtttcttaacacaaagaaagcatattcgaatccctggttaacataagatttgggcctcgcgtatctaatgttcgactctcaaaacatcgctgcaatagccttcagcgaagcgattctattattagaagccacaccggaagctagtttagatcattcgccaatttccgccttcctcatgaagaagtttctgctgcaggatgcatcaaacacagggtgggtgaaagcgcaagaggcgcgcacgaagcagaatgccatcaatacacacattcgccttcaggccagaactatcgaaaaagtccagagccagcatcgatgttgcggcagcagaagcaaggattcaacagcagcaaattcgcaaactttgtcgagacattataaactctacaattcaggctgctattggagaactctcgcttcagtgtgacgtttccccgcttgacgtccggtcaacgagcaatcactacagcaccatgacctggcaggaccgatccgtagtcatattttactacttccatccagcgcttggcaataaggacgccgatgtaacatgcagggtttttggtgttctacactctacgtttaccaactgggtgtccaagcactcgttttaccccaaatggataccatttccggagcacatgattctaagtactgccttgcagtcggttcccattgggtttcgaggtctctttcacgttgaagagctcgacatggactctggcgtctccatccttgtacgattcagaacgccgacaaccaagcgcttcatcacggcgacatcccacccgcacgtgacgcgtcagaaagcagccaagctcgccaagaagagcgatgggataaagtatttgacgacctccatcaaaacagtcactcacgaccggtcgctcaagtaacctacggaggccttgtttctcttagacgaggtcaaaaagtcctgggaatctggaaatccgatctcccggcacgaaatttacgtgcggatgatccaacaatttggaagtatggaagaaggagcagcgcaaagcgaattttgcacggtgatgaagctcaacgatggcggaatatcacctgcgcttgctcaatgggtctgtcgcaggcttgaaggtgccaactggagcattcggaaggagagtgtgtctcaaaaggttccgacaaattcgatcgcaattgcactcgaggcctcccaaaagatccgaaacaacttgaagacatgtacagttcttattaacgctgacgaggtatttatcaagtttcccccagagacaccgagttcgtggttccaacaggaaataagcgagtgggctcaaatgtggcttcagacgccaaaaaggggtgcactgagatggtttctgcggaaatgtattcctccatgattctccctcccttcgttgtgatgacggcaacacacaatggcacccttgcgcgccgtttttctacgtggcgtcaggatggcggtgatgccagcgtcaactttcagccctcgcattggatggacattcctaccgcaaaaaagtatgtcgacttcctggttagtctgtttccaggtcaaaagattggtcttatgtgggatgccgcctcagctcacacgtgccaggaagtgatcgattatttggacgcaaagggactcatgcacgagtttattccggttggcttgacgcccataatgcagatcggtgagctttacgccaacaggcctctcaaagtggccatcaagaagaaatttctacagtggaaggtctcgcaaacgattccagccggaggtaagtacaaagtggatcgggtgcaaatgatccactggatcgaagaggctgtgtctatggtgaacgagcagcagacctcggcgcgaaaggtagagtacatgttcggccgtctcggacaggacccacgacagcccgacaatcagcttttccaagagcacatgggtcagctgcaagacaacgaggtttacagctctctcatcctgaaccagacagctgaaagccttgagtagtgagcggcagattattttcttgcttttgatatttgctagctaaatattaacacgaaaaatgcatatttgcctgtctgaataccttttaaccccccattcaccgcacacaaattctacacattgttttttgcagctatgtatgctcagcatacgtgccttttcttgtagcactatcttcatttttgtatgatggaggcattaggggattcggctgctattgaattgcctcaatgtatgggcgacatacatgatgcatacatgtgaagcaatcaaattcggcttatgactccaatccgaacaaaacatgtatgctctgctgaggtatgacatgtcctggctaaatgatggcgatgttatgctacgttgcatacgttcgaaccaaacagaaagcgaacactactacgatgtatgcaatggttttgggatgaatatctgtgactaactgttagtgacacggttttcagagcgagcaatctccctcctcggcatcgatgtcacttgttctgcttctcttgcgagcgccggtgcctttcctaaactggattcgactgtcttggtgttcgtatggaatatttcgcccgcagtcccagtcttcatgccacacttggaagcaagtcttcgtcgggtgagggctgtctttcctgattagattgcatagatagcacctgcgtaagaaagaataccataattagctggtggcaatatacactgcagtacaccattgacttacttagcttcgcccttggagtatggtcgacagagccattttgtgttcttgccccgcttgggcttcccgttagctgccgttgccgtgtcatcccgccaaatactgcacactttgcatgcacgttgacgccgctttgtctgacctgtagtttttaccgcaagcatgtccgttgtctctttcggaacgtgtggaacgccatcatcgtctctctgtggctgagcggggcgatatggtgacggagttggcgagcgtgaagacgccttgaaagcaccaaagtcttccacagagagacccaccaattgcgcttgcaactctgtcaggaactcgtctcttgtgatagacttctttccgtgcctcttgcgatactctttgtgcacgatgtagctatttacaagtgccatgtcgacaaggcccacgaatagagccttgtagtacttcttaaagacaaagctagctgcaaggagtaccgttgcaatcaaagttggtcgtggacatcaactccacccatccggttatgataatccacgactaacttcgggcacagtacttttgcctgctctccactgggcatacggcgacctgtttgattcgcaaaaagcaaataaaataacgtcgattagtctgggcatatacgttgtaggatagaaagatatataccagcttgttagatgcttaccgacagttgtcacgtttgatgaagcccctgttgataaaaaagtggactggtttcgagtccatccaggatactgcagtcatggtcggaacatctttggcctttgccatcttgaattcaccacgcatcacgtctttggtcgttttttcttttgtctatgacgctcttggcaaacccgacgcgcgacgtctgaatggtccccactgcataaactttctttgataaaagatccattaggagcggaaccgaggtataaaacctgtcgattgcaacgacatggtaagtcctgcgacctgttggtatgatctgctcgagatttcgcagtactgcagctggacccgacttggtatcgatcctttgagggccagtgccaagatgctgctttacaccaccgtacacttcgagtctaaccaaacatcacgccaataggttggttagttagataatataaacaaccgcaatattttgccacaccaaatacctcagacagtatgctgtcttggcacaacaagttagaaacattttggtcccccatttgtggggcttgtctttcatatagacacgagtgccattgaaaggagacctcgaaggcagcattccttcatcgaaagagagcactggaggacactcataacctgacttgaacgtgcgctgcaggcacgtgacgacaggccttatcttccatgcgcggtcgctagctgcacggaggtcctcattgttggagaagtgcaagtttctaagcacttcgtcgaaccttacatagttgttagcagcacagcagtgagaatttactatgctaataaatattcagtagatgacagctttcatacctgttcctgctcatgtagttgttgaaagccccgcgtggaatggcacccacgaatgttgtagcccactggtaagccaatcgacgcttgtgtgggcaaagcattcttgccaacatcagaccaatcacgacaaggagctaatgcggtgcgatcggctccattgcacgcatgcggtcgcgaatcgctttctttttctcgacaggcactatagggtgtttcgcacgagcccgcttttgttttgcttgtagttcggtagcccaacgacctatcatctatcggttgctttcctgggcggtaacttcccacaacttcggtggcatgaaaaacaggaacaggtcgaggggtgacttggctttctccaggacagctcgtgttggtccatagctcccgttgtaaagaccggaatactcatgagacgaagtagggtccggcgatacatctacaaacgccaatgagttacgacacctacgtgtaagtatcaattgcatcaatttctatagtaaagccctgagcaaaatcataccgtagtcccagccgttttccttcattgcacgcacgctttccttgttttgactcatttgatacaacaaatcgtccgcctcgtccacctcatcgtcgctttcggtctcacaactatcatcacattcaatttcaatagtgccgccctcgaaatattcgctctcagtctcattttccgctctccacatcggaattcagactcacatactcaggtccatcgttatcactcgacagaggcgcaacagtggtgggcgcaccgctggagcaagtactgtgagttgacgatgcatcgctagaggcgtgtagtgcagtctggtcgctttggtcaacgggttctcggtgttcaaacaggtttcgggcagctgagcaagctctctcggaccgatctgcggtgcttctttccccagtaactgcagcagctaggtcaatataaaaatgttatttgcaatcggattcctatggtgggccatataagggtacaagcactgatctgtcactccgtcgggagtataagtgctcctcacgggctcgcatcgaccgattcgcccttagtctgcacctgagcgggtcgtactataggcggaggtactggcaccagggctcagcagcgcctcagccgaggccaaaccgtgtctggaatcaccagcagcgatggtagtcgaagcaacatccgcagtgcgcggcgttacgggtgtagatttggctttcttgcaagacttcgccgactgccttgaaggggcgaaaccgctgcgatcatcagtttgggaccttgccttagctgcttctgcgtctgcgggcagtaaacacaaaagtagggctcttacgtcaccgtaataccaaacacataccagcgctagtgcattcttacgtatctgccgattctgggaacgtgttagtcgacgtacgggcgccgacatgggcgaactcactcgtgctcaagcggtcaatttcgaaactgaaccactggctggctagtggcatggacttgtacctagacctctcatctggtgctgcagagaatgcccgctcctaaccacctacctagccctgtgcatcttggaaggttcctcccaaatgagcacacttgacttttgtattccattcgttcactctcgatacaaagtctattacaatcgtatgatcatgtatgctgagcatacattggtgaatggggggttaatggtaacaagagcaggccttccgataataatactgcaataatattaacacaatggtaagaaataaactattatgactgacaacggcaacagcaaagtaaaatattggagtggaaagtattgtattgatcattaccttcatcactatcgagtgacttactctccgttcaccaccttggtgacggtacccgcattccagaagcgccgattaagcttcaagaacagcaccgtttcaaagtgcaccggtagcataccctgtcagtggttcgacagcgtgtgcttcgcgacactgaacaaacgttcgacagcgttagaagttggagggatgtggcgtacccctccaaacttcttctgcgacgtgcgctgcttcttcctcgcccacaggacctggtccgcgaagctttgggggcgcccgccggggctgggagttacggtagcggaggcgacggtctcgaacggactcagcatgaactgctggtcctccgtcagctcctcggtcttgtccgccagcgcgagcacgcacgcagcttcgaagtctgggtccttcacgatggcagcatcggctgcaaggtacttgtcgacaacgggatgcttctcgacgagcgcatcaaagatgtcgcgcacatcgagaagcgtgttgctgtcctcctgcagcttcattgtcccgctctgaaaatcacggagctggtcgcgcagggcacgcaggcgactctcttggcggcgagtcggcatcaacgacacgatgtcgtcgtcgtccgtgtccagcgcgtcgcgcaggtcaaagtaacgctcgagcatcttgaacgtggagccccatcgagtcgcctggcgaagtacccggcgcaaattggtcttttgcctgagaaaaaaacaaaagagcaaaaaagtaaaaaatacaatttggatcggtacaatatatcacgatctcaaaaaaagcacaaagtacaaattacctcagtcgattcgccttgctcagtcctcgcagctttcgcatgagttgctgcatttgctccagcagtggctcgtagtcggagaggtacacgttgaccgccaaattgagccgatggctggcgcagccgatgaacggcacctgaagcaaatcagccaacctcgtgttgacagagcaattgtcagacaggaggtagatgatgctggaagtgccccgcttgaaaaacggtagaataccggtcaggaaggcgacgtggctctcagccgtctggtcctcaacactgtcatccgcgattggagccaataccaggagaaccttctcagagcgctggtcgtgctcgaaaaccgcaaaaacggcgacgtaatgctccgagtggaaactccacccgtccagcatgataccgaattcgagagggatgaacgcactgatgccaatctcgacctccttggtgaccaagaccgcgtacttcaacagcatctcggtgcaaatccgcttcatcgtcgtgtacttgtccacagtcgggcgttcgtagaacgaaaaagggaggttgcactcagtgacaaagtccagccagccgtagacggtctggctcttctggtcgataaaaatgaccagcgtccccgagttgaagccactgttcgccagcgtggtcacgtagtcggggtgctgcttcagcacgtggctaaagaggttcgagtagcccatcttgacgtcttgtttgcgcactgtgccacactggcagcaaaagtgctcagtgggctcatcttgctcgtcgagcagcggggtgaagaagtaggtgcagacttgcttggtcgtgaaggatgtttgcgaacgcatgatgaattcagaaatggtagataaggtgctggtagtacgctagagtggatgagatgaacagctctcttgaaggcatgccttgtggcgtaactacgagctatctggtggctgtcgtgaagagtttagcaaaacacttttttacagtgtcgtaaaaagtatttttcgtaaataaacaaaaggggtaattacctgtaaaaatactttattgaccaagaaatgctttttacaaaaaataagttatttactgagaaatattgtattggatctgcaatacaatgattatttcggaaggcctgaacaagagtgccaaacgcgcaacacccaaagtaagctgtctgtgaggtatggtaatgaaacacgcactagacttcttatgctgatttactacaccttacaccctttttacagcgataaattgatatatatagaaaacgggttaggggccattatcaatctccaactatagtaacttcagtatagagatttgtactccggcttaaccagctcggcctaccatttctcagaacaatgtttgatcgacccaatgcaacgctacaaccaaacaggatggtgtatcaacgcttttgactgagaacgcgtggtatggggttgttacgctgattatggctgtgtgattggctcaaatggctcaaatattcgtccacggcgggtgctgcacggcaacagcatacccgactgtcgctccgatggctgccttcgtcgtcatgaacaaaagcgtcaatctaggtgcgagcagacgccaatatgggcgataccgtaagccatcacagcaggtgtagccacgaaagctattttatctatcggtagagtctactaccgacggtagactaggtgttaccctgagcaccggcggtcgtcccgttactgggggccaagagctgtcacgcacagcactcgcggccagatcgcaaggttgcgagcgcggacatgacgtctttggtccgctcacctccccccggtaaacatctgaggcggacggcgaacgtttcgttgcacgcaactaaggaatactgcagcactggcttgtgtgtgaggttgatacacgcaccaccgctgaggcagcttgcgcagctcgtggtccagtcgccgagcaagaggagcacgagctggcccggagtcgcagagcggggcaacagtgtgagtagaaggagatatacatggtgcccggcagcggcatctacgtgtccgcacctacaagagggcaattgtaccgctgctgaggaggaattgcaccttgtccagcatcatgtcgtggtaatatctattacaggaatacatttaataggcgtacacgcaaaaatcatgagcgcaaggaccccttggtacgccgccgtgcgaacttccagcacaaacacttcacagtcaacagcctttaaaagccttatttttgaccaatcgcatccttctatctatgcgtcacctggtctggttacggaatctcgacacaagtcattgagaccggggtgtgaacaaacaccttttggggtgacagcaaaacgagatggggcgccagcaaaaccaaacgggcgccagcaacaaaacccgcgaattggagcctccagcaaaatgaattgcgggcgtcggcaaaacttgaataaaaagagcactagctcgcgggtgtcgcattgtgactcacacattcaccacgtgcacgcgacggggtgtaataacacgaggcatcagtgacgatagatttacctgttcgtgcttcattcactacatgcatgtaccgacatggtattaaccacaaatacacgagcatttaccgcagagatattgtgctaatactgggagctggattcaggaatctcaactccttacggccttcgtaaggctgcgcaatacttgtagtagagtagatagttgtcgttctctttgatagtaacacgttccctagcaagctactgtgactcgctacttggctcgtaggctccaccacaaattaaaagtctttgacgcgcggggctctttcagcaggcatgtccatggcgtggcagctactagctgaacatggttccggcgacgcctttgtgaagcaccgcgccgccgatttctgcgtatgcaaagcggacaatggattgttgccggatctgcaatgctgaccatgaaatggccgagcaacgactgcattgcatcagcccgtcgtgtgcaagactggaggacgcccacaatggtgagcagtgcgaagttcagtggaagtactgtgagtgttaaaccaggcctgtgtggcgggtatacagcaacaacaaagaacatttccgcgggggcgaagtctgtacaggtgctcaccgaaatggcttcgtgtggcgtcaaaccccgacacatttggagtcaacttcaccgcactcatgacattcccgcaccaccgttaggtataccttctcggcagcaagtgactgactgtgtgacgcgcctgcggaacaagaacctttccgactttttcacactgatgcaacgtttaaacttagcgattttggatatcctgctgttacttgtggattcacagatcgctctcgagtgtacccccttatcgctatcctagttgtaagcgcgagaacgcatcgcgagtacgagttagcgtttgggtgtgttgcccaaatgtaccagcggatctttcaagccccactttgcgttgacacggttatggatgatgctgaagacgcacagtttaatgcgcttcagagtgaaggtgcattccgtggcagcaagtacttgatgagctttttccacgtgctttacaacgttcataagcggacaaggcaccttgatagcgaaactagagtgaccgcgtttaccggaattatggatatgcattacactactagttacacagagtactgtgcgatcaaggagcgtgtgatttcggggtggaaagcaaagcccggattgcgaaactttgcaaactacttttcggaacagtggatagatagtagctactggcgatggcatattttttacactccatcaagttatgccaccaccaacaacccatgcgaggtctttaacgcatgctgaagcgccatgttcagcgaaaaacaagcgaaatctgcgctcttttgcctagcatgatcacgctagcgggtgtgacattccttctccaagtgctagtatagcagatccgaatgtggaaatcaagcaaacggcaaagtggatccttaaggccaaggctgttgctgttgctcgcacttctgtggattcaaatgtccgtgtattacatatcctagaggtgcatatcgatgcggtagctacggagactatgcggcaactgtcttgctcggttattttgggggctggcgaaaagcattcgctctcttcgctagtattggagaaggcggagaaggtgaaagcgtcgcgtttgtaccgggacagcgtcaaatggtctacacgtcgcgcatatcgagtccacatgcgagtgaatggctgggcagttgatgtagtcgccaactcgtgtggctgcgctatgcatttgaagttaatctgcgcgctcatagtttaagtcagaacttttctgggacttggaaatgaacttggagaaaagctgcagagcaggcgcgcggaaaaaaaacagagatcccaacgtgctggagagccgatgttcgctacttattcagttccgaaccatgtttcaagtggactatctgttgatactacaacagctaccagcattaccaccccaagtagtgtgaatccagaaacggtaattgctgaagaggctggtttcctgcatggaggaatggagttaagctatgtgccgttggtacaccacacggggattgttggacaggttgagcgtcacaatattgtaaacagccagcacagtttaactgtggccagccacaatgggttcgtaccaaccactggtgctgcttcgagctctcatagtacgtatacacacgattcacacccgcaacaaacacaagagggtaattggtttggatacagcactcctcctggcgctgtgtatgctgaagctccggtttgcttcgacgcgcatgcggatctgcatcaaccaaatctcaactttgtaggcgtgcctacaccagcatactgcaacaacatgcgtacaaggcctcacatggcagcatacgtagccggcgcatatcctagtcaaagctttgatgtgtattcgccagcaggtgtatcgtcttgcccaccaacaagcctgatgtggtcgccagttcatacaagcagttctgccaatgtgttcaccgcttacgagagtagatttacgccttctatcgactcctacatcggtcaaaacatggtgatcagtagctctgatgtactggttggacaacccgctccacgacgtgggggttgccctccgcttgcgactcgtgtgctgcatatcgactagcgcgtttgtggaggtataacttgacatcttagcagtacacacttttgctttaaaaaacttacatatcgtttccgtgaaccgcacttttaaaagcgtcgtacactatccgatacttttaagtcgagtattcgagttaaattgaatccattcgacttaaggtgaatcctctcggcttaacttgactccgatcgagttaagtcgagtgctcgagttaagttgaatcccctcgagttaacttgaatccggttcagttggaccggttcaaagtccgaccgccgtatttctggttccgatttgcctcccccttcccgctcatatcgcggttatacacgtgtcgatggcggagcggcgcacgtgcaatcagatccctatggtggagagagcgcgggtggtcgaggaatgggcggagcatcaagatgaatggactgcgtcggaggtcacaaggaggaatggcatccaattgctcactcttctcgggtggcgtgacgagctctcggatgagaagcttgcattcgttagaaaggttcctgctgactccaagagaatccgcaagtccggtgctgacacaaaagcaaagctgaagccttatgagcttcgggtacttgacttctacaccaattgtcaacgagatggagaccacgtccgcccaaagaacatcattatctactgtcagaacatcccggagtttgtagtcatgaaaaagagtggtcaaatgacgtgcacaagaaggtttattaaccattactatccaatagtgactcagcggctaaaatctattcgcggttgcagagatcaagaggcgctggccgaggacgctcgcgcgggtcacggggccaacgagagcgtggagacaaacaggggagaagtggtcgaggagaacagccagcaggatgaagacgtcgaagaggaggaggttgaggctgtgcatgaggaagaggcgggaagcgctgaagaagatgacagtctgcaggaacagcgcagaacacagggtcgggcactgagcaaaaaactcgcaacagggaaatgctgtatgatggtctgtttatttcgacgaggttgccgatatcattacggggggtcatcaacatggtagataggcgtgacttctacggagacatgttggccacccttgatgccaggttgttcgacgtgagcacccaacatgttgcgggagcgcacaacatagagaatttgccgaacgacaagtcgctgatgcagccgtatgagctccgggcgattctgcctctacgtgttttggcaaaatgtgaggcgatggcatccgaattgctcgcccagcagcctggtctcattgaaaaagacgttgcgctggacattgtgggagttggaattgcgaccacgccaactttagcggttatggagaagtggcatcgtaccatcgcgttactacacaaggtgagagctgaaatttcctgggtgcgctcattacgcttcaccggctccaacggtcaagacgctcaagctcaagacccgctgcaggttgcacctcgtctggagcgactgcggatatgcactcctcaggtacgctgtcaattttgcttgcctattattacagttattaagcctttagattgcttgtgcaggtcaacttccttgaaatcgcgggctacgacaggctaagcgacgcctcaatgaatgtcatcatgcaagggcttttccgggaccgacctgacgttactcacttcgacccagcggtgctgtatctggttgcgcagcagaagggggcgaaggacatgccgaacgcccaagccgttaaagatacgttggctacggttcgcggtaagctgattgcacctgtgaatgtagcatggaaccactggggcggcttcatgattgatgtttcgtcagcacgcattcttctctacgactcactagactccagcgacaaagcacaatcgcggtccgtggcgaaaagaatagtcaacctgctaccaccgctgctaagtcggtttgtcccttggcgctcttgagccagcacgtgccgccgttgaggttgctccgcgagaaggagcggcagccgctccagttgttgcagatgtcgcagcagtcggccggggtcttgccgggcgtgttgccaatgtcgttgtccacaaagtcaacgttttgctggagcgtggactggccgaccgtgttcttaacctcggcttgacgccggccttgttgacggtcgtgttcttgccttgagccagcacgtgcccccgttgtagttggccctggtgaaggcgttccacccgggccacgtggggcagattgagcagcaggcgccggtgttgctagctccgacgttggcgatgtcgttgtcttgaatcttgcccaggtcttcgtgctccttggccttggtcagctcgctgatggccgtctgcatgtccatggtctcctggctcagcagcttcttggcgggcgcggcctgcgtcgagagctgttccgacgcgtacgtgtactcgctggccggtggcatccgctgcgtgtaggacgcgtcttcgggcagcgcgccgaggccaagaggttgccgatggggtcgtcgttgtcatgggggcgcctgcgggccccggggcttttagccgtagccctgcgccgctcgttgtgttatgtaccgtacatttattttgttttgtttttgctggcgccctatatggattttgtcggcgcacttttcacattatcattccccgcctggaggcgatttcgagcgaaaattacctttttatgaaaacaatcattcaaatgacggcacttaacaacagcaaatcgtgaaagctacctttcatcagcaatctaacagccattaaaatgagggcaaagtcttatgtaacccgggtggcgagccttcgtatgacgcaccatgtgattgcatgcattggtgggcttttaggtaggctttgtggtcgatgatcgacgataggcacccgcctctccacagacgcataccttgatttggtgggacaaaaagtctgatctaatgaactgtgccatcaaatcagaccagccagaatgggtgcatgccgtaagaagtctgtaaaaacgctttggctacactatcaagaggtactgatgcagccatttgagtttagttaatacttactaccttggcaaggacacattccgatgcatgtacactgcaccgcatatgagcagggtaaaagtgttactgccgcggtagcggcgtacaacggaggcgagcggttgcgaggttgcgtagccgtaggacgcagcggtatttgcggaggcgggcccagcgccgagcattcctgcgagccgaggactgtactaaccagaatgttctatctccatgtcgtgagcgaagcgaacagcggggacgccggaggggcgcccagccaagcgcagcgtggctggtacttgtgaataggagagctaaatcgggctgtagatggtcttaaatttgagtatctggatgctgcgttacaaattatacagtgtaacctgggctccggtcaattcaatagtgaaagccctgccctcttagacagcccgaacaataattgacaatgcttcttacaagtatttatttcgtggaaatcctgctgactatgtttatcctttcttcgttgtgatgaatgatacaaaacattgggctctacagtatagtttctataaatgccatcttagcctccacaatcatgccacgcatcgaagtgaaaccacaataacacttatatcgagccttaaccgcccggcgtacagagttctccgataagcgccatatatcactacgtatcttaaatttcgcacccagaaaacgtagtctcgagaccgactgctcgctcaggtagcttataatgactagcatgttataaatgctgcccaagcgacagagatgttaggatcgatgcataactaacatctacattatacttagtttatccccatcaccacaaaaatgctcagaaatatttatctgtttcttgttttccaagtattatactttgactaaatgctatattgttaacagcaaaaaaaacactgaatgggggcggtgctgcaaatatttcaatgaatatttgtagcgttgcccccttagcaactcagacgaccaatcgccgtgaggatgctgccatactagtaataacagtaataacaataatatatggcgcgaagcgtgctgatacgctagtcactattcaaatggtacttagaggactgcacaggcagctacaacgcgacatctagtgtagcgcacaagctgatacgatacattcacgttccaaaatcacaaatatgtcaataatatgtacgcgaatccagagaatctaagtcgcatgcgacccacattgtggtgaaactttgccggacatactttacgaaatcgatattcccatggttaacggtctctggatagtgataaaagcctaatctcgtatcactaagcactatctggagattaggggatgtttttacttgaatttgaataccactggtcatcgggagagcctttataagtgctaaccggagggtatttctattcgtaataccactccaaagaagatattctgtagtttcggccttttgcgtaaaagatacggtaattttaccgttaaaatattgcgaaaaccggtcgaaatgtctacaacttagcatcgaggggtgtgtgtgtgtgacaggttctaacatgtgaaatacgaccaacttaaccaccaaagttttcagcggtgtttgcaccaatcgatagatgtcgttgagacgcttcatccaatcgtcttactagcttcaaagaaatttgatttatttccgtcgcaacacatgattgtcggggtaggcttatactaaaaaaaagaatcatacacgacaactagataaactttcagcgaagttttagatgaacctgcgctacacgtgttatgatattatacaggacgtttggtggtaactctccctcgcacatgcgcattagaacatttaggatttgactcacgttacaaggggataatttgaggctaccttacatgtgaccattttggctactgctacaaatatatgagcaccccaccgcttatacaaaaaaagtcaaaccgattgatgactacatgaatagcgagtcttatcgtcgtgttttatgttgcattcatagcggcggcgaggcatcgataaaatcaatgactgaagctccggcatgacggtagcattccaggcctcatagaacccagccgttaccttgttcacagtgcttaacaatatgcatttggtgtccgttgatgaatgaccagagggattaaggccgggcgagcgaaccggccacgcgagcatcctattacgcaaatgcttctgcgtgccgtgcacttgggccgtgaatcgatgcgccacctgctggaaactgaattcagtttcgtggtggtagtggtgcacgggaacatgaattcaggtaaggtgtacacatagtcgttgacccatcgagtggttagattaacaagtaatgtgacgcagcgaagaccggcctcgtagagcccattgattcgcccccgcttgatgccgttagtagtgcgccccgtcttcagttccacaatgcaagaagctggacgagagcagtagcagaggatcatcggttgtagagagctgaccccttgcattttactaacaacggttattgatgtagtcattacttcgtcatcattcggtttcacttgttttgtatatgcgatggagcgttcatgtatttgccgcagtatcaaaactgtcacttgtataatacggactccttttgtttattactgacgcctactaatacctaacaactccgcttagtaaatcaaatcatattcctccatttttactgacagcatcccacattgcgtgcataccagcttaatcaatctgacattatgccacacaactgcgcaacagtcgcggtcccgcgaggctgaaagtgctctcagcttgggtggaatgcgatgataccaatgctgctgatgtcttgatttatctggggcttgatgcatttgcgtaagagcagcggcgcaagctcactcactagtgacagaaacgacatgatcacatcgaggctgtatgctacaagtaagggtcgacacaagaagatgaagacctgacatcgcggatgcggggccgccctctccatgcgccctgagatggatctgatggctgatggcttcaactaacggcttgcgaaaggaaaacgttcctatttccattatgaagcttcatttgcaggggttagatgtttccgcaacatatggtgtgccaagttcccgcgcatcctggccatggatgaaggcgttcgaggcgcgccacaattcctctacgcgtgccagaacacaccaaatgcagcagccaccagaaaatctcgccaggattgcagccgccttaataaggacttggttgccaaaacctcggtatatgaaaaataccaacaccggccaaactgcgacgacgtatcattttgtagcaatttacttaactaatacgtttatgaatagctgtacttttgagtagcttatttccagtacaatgactaaaaccaggacctgatatggtatgggtgtgctgcactggggaggacaaagagcccgtcaccctcttcgcggactcaggtgggaccaagtcaccatcgttcgtggtgttgacgaccaagctatccaaacctccggccactagggagcagaatagaccactgcatcatgggcccggagtaaggctgtagaaaccatcagcgaggcgcagaagcatacgtcgcttcaaatctatggcaacaagaaaaataaaactttactacccagattaaaagcccacgcttgggatcggcaaatatcccacgagtgggctcaagcggattagttgaatgcatgagtaaatgtattatgaagagcgtttagaggctactagttagcccaatgtagtgtttaaatggagtgagtggtagccccgacctggcttcaggtcgcaaaccccagtggatcagagcaaccggagcagtaaaatgaggcctttcgcccgcaaatactgcatttgcgctgcgcacccaagtttgtcccgctaagacgtttgtactggggaagtgtgctgaatgcatagagtgtgtgagttggggtgctacgtcatcacggaaataagcagcagtagcgaccctcgtcgagccgtgcatcacaaagtcgttgaataccagttgatagaccaattgagagatgaacgtattgaagtcgacaatagccgattctaaaaaccccgatttgactgattcgtagtgataggcgcggaaagcatccaccaccaccatgccaaacacagtaacgagcaaacgatgttgccactgcattgtgtgccaagtgcgttccatctcgaggctaccctgtcgaagatgatcatgaacatctatcaccgagaacttcgagaaaaagagctccaccatttgggggcgctggatacgtcggtcgtactatatttttttcagctggccgttgtcaaggatgagcttgtgtcgtcggcgaacgctatcgttgctaggaagcgacgttccgcggtttgagatgaggcacttcgctttgcggtcagcccagcagagagcatacatcgcggtgcctttgggggttttgctctgtagcatcttaaatgacccgctagcgggctcagtaccaaaccactccgtcatataatttttttgatatcgcgagacgctgttttaaccattcccataaagtaaaggccgcaaagattttcaagttgcacaagggttttaaccaaagcgaaagcactgtctgcaacaacggtgtgcccgctacctttataaacttcagaaagccgaagtacaatcgctgtaccctcgccaaacaacgcgtggtattgcttctggcgttggggctcggctctatcaatctaaccccaacagcacacccgaatcaccaacagcgatagcttttagttcggcacccacgacttctggctttcttggaatttttgtcttgtgaggtatgtcatcttggcagtatttaacctcttttccctgccaggcgctcatgcactcatcaacacaaagaatctcccccggtcatactacatcgcggcggcgggaattaaatccatctattagcggtctaatagatttccgtgggtcatctgacggtacatcatcggaaaaaaagagcgcggctgaaatattttcaaaggcgtgtcgtgtaatgggtaattggtaatatatccatcgaccaagtcgatcgcactgtacatcgtacaccccgccatgttgttctgaagaacatccttcataggaatgggcgtctgcgccagaatcgtagcggcattcatcttattaaaagcatgcacgatacgccactttccattcggctttctgacacagaacgtcggcgtagagtgtggagacttactctcacgctgcatgcctgcctcgtgcttcgcacggaagaacgcgtcaatgacgtcacactgctccttcggtaagggccactgcctcgtcacattcccggaacgagatcgatttcatgtcgaaaacctcgattcgctgcaagcccgccgagaagcttcatcactgcagtgaacaggtcgtccggcaggatagtcatgggatttcggacggcatcgccgcgacggttgcgagccaacttgtacagcaaccacgtgttatacatctcggctatcacgtgatacgggagccccgtgtgaaaagccggatggagccgagcgacagtgtggcaggaatcaagcgctgccacgctgtcgttgaaaagttcctggaatggacggaattgcagaccaatccaggcaagagcgccttcctggccgtgacgcgcaacgcgcgcggcaaccctgcccacgacaaggacatgaagttgttgttccacgacgaggaggtctcaaaaatattttttctaatctgattttgtaattagtaatgctaatttgtacctactgtttctggggattgtactgcttgtttcgcgtatcttccgaagcgaaagctcgcaaggaccgggacaaagactgtctgggtaaaatgcgctggaaagactaagaccgcgttaccgcttcatgaagattccaaggactcccaatacccaccttttgtcgtatttaaggtcaaaccatcgaagatcgagcatcgacgtcaggaaaataccgcggttcgtcatggttttagtatggccatgtggaagaccggcgtctcgcaagcacagcaagattacggtatgaaaatgtatgcaaatgacaaaggtaaagtctcgtcgtacttcagatatatttgcattgattttaaacgattctgggatgttgaaaactacacaggctggtggaacggtccgttgacaattgattagctgcaattccagtttggggaccctgatatcactttggggtcaatcttgctgctgttcgtcgacttttcaggtcattgggccgaggaagccgtcgcgtatgcaaaggaaatcaatgtcatggtgctggacataccaccaaattcgacctccgtctgccaactcgcaaacgccacttggaatcggccgcccaaagctcagttaagaaacttgtggattggcagtctacgggggcagcttaatgcccgcaactcagaagtcctgtttaaacttcaagcaccccagcaccccgtcctgtgtaagaggatccatgacgggtagggtagtattgcgagtactacgattgtttctgggttcaagaagtgcggtctattagaaggcccaacagcggtcgaggtagatgagagatcgagaacgctgatgacatcgtggatgcagtgctccatacgtgcaaagtagatcaaactctaggtgtgtttagtttagacgatgattttgacgacgttttccgtccggtagcaccgttaagctaatgcacacattctctttacttttaccataatttgcggcttttgctagtttttatctcgctaaaaatgtgtttgtggcgactcatatagccgggacatcaaaactcaggtcgaatcaggctgtatgctcagacaaaaggaattcggtactgatttatacgattcacaagaacgcctagttcatgatgagatgcgtgtgtggaagaagtagtgtattcaatttgtgttatctgcgtaaacaagttcaactcaatctagtatatctcctggcgtcctcgccgtgaaagacgatggttcgtatctcactaatatcgactgttttcactctgtagttagcaagccgaagaaatgttgtccaagtgctgctggcgtttgccgcagtcatacggtaaaggcatcagcaaactgcgatagactttttcgatagattccataccccactccgcactctgtctaatcatagtaattgccactaaaaaaaaaaacgacttcaccgccacctgaacagaaggtagtaaccaattcacatctccgaccttcattgcggtcatgattttgccgaccacatttccgctgcagtggaaaacactgtcagccacgacaccataacgatcgtctgggtgtagttctgtcgaggatagcttaccccggaattccagactcgtatcatcatcgtcccaggatcgtgggcaattatgtttgcccagacaatatcccgtccgccgaaaacgtagcgtacccgtgacgaacacaccatgctgccaaccattataatgtgcattctagatgtccggttctgggagcagaagtaagaaacagaaaaggctcttgctcccaatcaccactaaataaactatcacatcgatacaaatacattgtaaaatcccccgtccacgaatccccatgcgaggctctttagctgccgttaaacggggaaatccgaacgttgcttgtcatgtagggcctccttcaattttcgtttatctcggtttgcgcctcactacgcaatctcaatcttcaactcgaatgggggccgccctagaaagcttcaacaccaccttcaagtgttggggctgcttttggctttccatgtacactgtgagcatcgatgatggctgtacctcatagttacacgccaatcacacgctcgatttcggcatattagccttaccgagacaagctagacaccgttatcatattcttgtatgtccgttcgaaaaacgtgttcatccaggacgaggaatcggcatcctttaggcactattaaggtgatgtagtcccgcattcggacgttcgccatacaacctctgtctcaaatctcggagggccttgagagaatgctgtcgcgtctgcgaggcggcagaaagcgccagcagggagcgtgtgtctgggccggacatcgttcctactgcaagaagcgcgagggaagcaaatgccaatattggttgctcgtgaagggtctcttccgccaaacgagagctttaccgataaagatgttgtgaaaacatttgtccagctggaaatttttccctttttccgatccgcatgatgcgactaagatatcttacttcaagtggcgaaggtcaccggacgcagttcagtttaatgactcttcgggctctacgggctcttcaggatcttcggtgaatctaggtgggcgactgccgggtggacctcgggatcgggggagggggtgcacagtgctcgcctgcgaatatgctgtctccggcgagtaggtagcacctggggtcgggactgagcgcacaggcatgcgtggatgcgatgattccgccttcgtgctatgccttctggttcggaagagcgccggaacgccaccacaggctaccgtctgccgagtggaggcgcccagttaaggtaactagcagccaccaccagatattgagcagcagcgacggattttcctccacaaaagcagtatcctctgccaggtgacgcgcgagaccaccacaaccggaagtcgagaggatgagaggttacgccgacacgaccagcagtatcacatacaatgccagtgactgctcaagccgagaagatgtctggccgccacattatgaaggctaagagcaacactactttaacgtactgagagtcaggaagcgaccagctgtcgtctatccacatcgttagcaacacggtcagagtagaggcatagcagcagcagattgagctcgtcaagactgccgaagcgctagctggatcacgtcgagctgtagtagatagactacgtcgcagtcacgagagtcgtgggatcacagagagcaggatctcctcccagccgagcagaagtaggtacatctcacaactatgttcctattatagcgagctaggtgctgtcaatgtttttacgagctcttgcctcaggcagttttgcaatcccttatttatacagatataaacatgggtatgtatcgcgagattttacctccttatgtatagtcgcagtcgccgttgatgtccagtgcttgccagacgtgaattttgctagcagaaccctccggcaatggtaaatgagaggctgggcttctttcgtgagtggttgagatgggaagagcaaggaccaatgtaatttgaaacagacgtatttgattgaaagtgattaatttgagttttgttgcacagccttcataactgagtgcctcttcatcatgcctattagctttgagcagcgtcccacgcaggcatgcctcgacagacttcttttcgacttaaccgcaatcatgtctgtcagcaagatgcattaccgtgagagacactaaacagcgctccgattgtaaacagttttttatattgttttagctttttgtttgaactgcagaagcaaattggtactatcatcccgggttttgaaacgaagcgtatcttacgctataaagaagaaaatgttgtagtgcgacgaggcgggcatgttgccgtggatatatgaggtatgtttttatgaaatgataatataattacgaaaggtgttattataccatttggcgtgtaatcagtagggctcaaaatcagtatcgaattgtgatctcgaatactctgtatttgcgatcgaagggtacaaacatactaaagcactaagtatttccatagaaatccgatgcaacgcaaccttgcagtttacattagttatttcctctttcattcctaatgtagcgtcaacacgcaaaaaaaactactcaagtgcacagctgtctagagttcgcactaggatcagagcaattaatatttcatttagaatccctcaacacatcgccgtggtcgtggcggctcgcgccgagacgaacttcttgtactccctgcgcttcgctgctagacgcttcttggtggatatgctggtcccacggactcctgcttcgtaccggtggtagttgtcgacctctccggcacgaacggcacgaagggagtgtaggagaggtgagagcgacgcacgtgtggaagaacaagtcgtaggatgtctcgttccagcgccatttgtcggcgcacaccctctacaacattttcaaccgcccaaagtagtgatcaacgcggaccttgtgtgcgacctgttgtcgttttgatgcacgtcctcgcgcaacaccgttcgcaagcgacgctgacgcatcggatgaacggcacggaagtgggcacccagcccttaataggggtaccgcccactcgttagagtagacgtcttggagagggctatcgtctgccagccgtgctccccagaacgtttcttgagcgccttcacgttcaaggcatcattttcacggaacatggtgaggtcggaggcgctgcccctaatacggggcgagcagttcatcgccaactcagcgggcaagacggacacctctaccttgtacccgtacaagtggtgtttgccgctcaacgtgggcttggaagttcgtttacgaagatgacgtacaggtacgggcttacaaccgtcaggaacttacgcaccgtattctggaacgtagttgtcagtatgcaaaagatgtgagcgacgatgtcccattgactgctgtgcttcaaggcggagatgctcatgaagaacacgtccttcccggagcttgcgggcgttttaccaatgctcgtgtcaagtagacctctaccccacagctttgggaacccttgaggggtgaagttcgtgtaccgaaggacttcattggagccttcggcacgaagacacaggtcgtagcggggggggggagctcgttgtccgagccgttgggtcggttgggagcaacgtgcgaccaatcttcgccttattggaagaggaggatcggaactcagccagggtcggcccacaggaggtgcgtttgggattgcgttggcgaggggtgatggtactgcgttactcaggcggttaaatcgtaaatgaggattgttaatgcgtagcacaacacctttaggagtttgtacaagcctcggcggaaaacgatatagtactagtcgttgcgtaaaatgttacataatacatttctgtttgtgcaattcgatgtacattcaaggtggtagtttgctgttcaccaaattgtacctatgaggaagacgcgtttagcatcctcgataataccttggtagtggttgtaagctctagtgttttagttacctcccggaagttctgccactgggtgccatccaaaacctatataaaacggtttggctattaagggtattacatcggtcattaaatggagcgataaaacggaattgtttggagaataaaacaatttaaaaatgggcttggtcgcccttttaatgccccttattccacagctcgataacaatatcttaaagaatgtatgggttcaaatagctccctcactttaagatttcgcttgaattgacgttgcacgcgtgatcttggaggccgcacgccttatttcgaatttggactcctcgcgccaaagtcttcacctgctacaaacgagtatgtacactactgtgagttgatgcatttgttcatagagtctaaaagaccgtttattcactacgtagccaacgatgtacccgtctctcccgatcaaccgctgccacgcaacaagcgatactctcgagtcttcgattgcacccgactccaagcgccgcaagatctccgtcaagcaggcttctgatgtcgctgcgcctgaatcgacctttgcgaaccgacggcggaggagcctcagcttccctcttctccggcgggtgcttggcggacaagtagcccaactgccgcctaagtcttggtgaaggtcttcgtggacctcgtcaagtacaaagtgctgtcatttcagttgaacgtcaagcaagttcaaaactggcttcggttgctaaagaaaaattggagagcgagcgagatacgttcagcttttggaagcggcatcgaggaatctctggaagcggttaatgaacagggtcactacgtcacattgcctgggctagttcgagagtacgtacgtctcgaaaaagttcacgcagtggctcagaaagcgaaattcgagaaagagcaggagaaagcagctagtgttgagttatgtacgtctgagattatcgcagagagtaacactcgcagagcagtaggttactttgacgaactggattcgttctccgagcccgaagacgccgtatcgggctcccgttcggccgatacgtgcaactcagcgtcagccaaatcgaccccggcgaaatctagcaaagagtggtttgttgtgttcgaaccaaatcagaacgcttggataagcgtaatcgtgacgaatttgctttgcggaagcaacactttgaagcgaagttggactgacaggagcaataacatgcagaactactggagttgtagagaagtcgagtattggcttgcaaagcagcagaaaaacataatcgggagctgatgatcaaatgcgtaaaaatgttttgcacaggacaaaccgctcaccgatctccctccaaaacccgcttgtctatcctcccaccttgttgggagtgcgagcttgtagaataggatacagaaattcaactccagttgcggccgtcctctcctttgtagtaataacacccatcttaaatagtgaaaccaaaacgacgagctcgtcttttgaaaagcgaaaacactgcttgcgtttagattttgagaacgcgttgaagttgaaaggcgccttgagtggtctctctacttcgtcacccagcacatgcgccaagtgacgacgaataatggccgcttttaaatcggccccatactgaagcgcacggcgtcagcgtcgaaggaggtacgccgagttttgatgtcgcgatacacctttcgtcagtcggcggatgtacttcaccatagcactgcctgcatcggcgatggcatcgtcagtaatcgtagtcgtagaagtagctttagctagtcggctagtctacgttgcagaaccgagcgacggaaaatgaagtatttcttttgccgtcgttcggttctgccttcaggtttgctaattgtggctttggacatctaaaccgacaattaggggtttgtggattcgtttaaagacctcttatacacaaccttcctgctcgactagctacggccagctcgctacactgcagcaaaatcatgacctgatgtccgtccttgtaaccgtctccgagcacctacagagtcgtactgggcgtttagcgcacgtcgtaccgcagattacctcgctccattgcgttggcgttagctggtctttgtaggccttctccaaaagctccgtccgtgggcggctgcaggctcagcgcgccgaacacgactcagctccagccccagtagcatggactaagatatagcgcaggcacttcgcgcttgatcgctccgtttcgctgtacgaggcactgtcggcgcacgtgctggacgcgtccacagggacgtacgttgcgtcgagcagctttttcctatccgcggcggcgctgctcttcgccttcgtcccgcaagaggtctaccaggagctggcggggtgccacacccagcagtagcagcagcagcagcgcagaattcttcttgcgtcatcgccgtgtctgcatcacgcttcttcacacttgcccccgatgctcctcactgctgcctgccaaaatgtgaaatgaatggttttggcgcgaaaacctcgtaacgatcataatatattagctaggtcttctgcaatcttataaatataaacacattaaatctcagaagtaataaggagtattaggtgtcggaagtgagggtacctacagtattgtttaggaggtacgtttaatgtccggtgaaaaatgaagtagaagtcccctccagtggagggatcaagaaattttttgcagccgcttttgtgagtcaatcccacggcgctctttagtaaaaggcgaaagagtgatgcgaatgaaattaactctgcggaacgacatttataccacacacacaatacccctatatattatcttccaccctcacggacaatcacgcgttaacgaccaacttatcttatcctaactaaagttaacctcaagataccgtaaaaaactgatccagtgcgacaccagttttccactagcaagaccattttatacatcgttattagattacagagtcgtctaagggcctttcagccaatagaaattgcgtatcgagacagcacacgcgtgggctcaaaaacaatggttgtagataagccgtttttgctttccaaagcaatataattgattctaatgagctctaaatggcacaatgaagtacgattgacttgccactaaccccccagaagcaacagtatttatttatcagatcatagttagtgcggaaagtcgattggtagtctccatgcagcctacttacctctaaaatgataagggcaatggtccaagctctacagacgcattgaaaaaagcgcagcaagcaaattaattcacgtgatacatgcactgttgggacataactggttagcattcaacaggcaaaggcgtcaacttgttgtacccttgacgcaattgtagggattcccgctttgggagtaaatcagtggtccagtaacactctatcgaggcgttagtgcttacaatagagtctagaacgtatttaaagtgtttatgtggtcggctcttactaagtttcacctcctaccaccattagaacggctaagaaataaaatgtcgaacagctaaaataggcctatttttggcccagtcttggccgctgttgctactactgcagtacttgcttaacgctgtgcggcttgcattatttcccttatacgtagaggtacacctcgagtataccagcaccgattctaaatcatacttagaaaaaagttgcgatcaggtcgctattttctcgaccataatctttgtccggatatgttttgtgaagacaacttcgtttgaagccgggcaaaaggcgctgaacagatctctatctcgtttatttgtatgcggaggagtatctcgaaataggccagacaacaatagtatcggctttttgaagtgagcccacgcgtgggctcaatgggtaataaaggttaattgacactgtgtcgcattggatccgtttactacggtattatatgtctttagtaaaaagaaaagttgctatttgggttttcacggctgacattagcccctaacttcggcaaccagttctttgcttctgctcccaaatccatgttacccaaaagcgaagttagagctgggccatttcaatgatcgttgattgcactaaatttgccatgcactgctcgtgatgctcctcaataggcagggcaatacaaactctccgttaatacttcaaaaatacgctgcacaacgccagccgcagtggactatgaatattagcaaaatgtatctggaaacgaagtgttatagcgaaaagatcttccggccttcttgctcgccagctgagtccgtactcaagtcgtacttccacccacccgatagataaaaatacgacctgacatgatctgtggtattctggtaaactggagaacagtttcaagctgagcacgacagccccgtgttgtcagctgtagctcggcccgtccaaaaccttgttaggaaggcattcacaatgaggtttgtcgattcctgtttattgcatcgggttttgagcagtgaatagttgcatcaaataacaacacagtatcgcaacccaacgactgccatcgtattcaaacgcattttttgcatatggtacacaagccaagcggagccccgcaagctgagctcatctcaccttgttaagctacgcgaatggtgtaccgtaccgactccttatgctcgaacgaacgtggtttgtaggtcttcctatatgcgggtaggcgtgtcgtgagtagtgtgtgcgtgtgctgtgcgtagagcgcgtggttgtgtgtggcgggctgtgtgcagcgttttgtttgattttgggtgggttgtcaaattaggaccgagtgtagctcacatgtcagttggtagagcgattgactgtagtgttctatactgtgtctcagtatacttggaaatcaattggtcgctggttcgattccggccactcggattttatccatgtctcccgcgcactccttttttcattctgcgccctccgtacgccccgattcacctgcccacgtctgtctcggcggcctggcgcctcgccaccgcgtccacgccatgatcggctgtgttttgggcctacggcggctgaccagacgtctgcaccctgccgacctgctcgacgtcggcagtgcgcctccgatggacaagcggggcggagaatgcgtatcgcttcatacgacacccgtatcgcgacgactgacgacgttggttgccacaggcgaatgccgttgcacgtcgcgtaagcgaataggacgtggaagttcgacccgagtcacccagtcagggactcggccggcgcgtcgacgctgattttgcgattccgctttgtggtcgctgtgctgtcggcagcaacctgtgaggctaccagagcatgtgggatgggtctgggcgcatcgtggaagcatggaatgcagctgaagaggatgcggaaagtcggtgcggaaacggtgtccgcgcgagatgtgtggtcggtttgtagggcgttgtatgggccgagtaggatgcggataggcgtgtcgtgagtggcgtgtgcgtgtgctgtgcgtagagtgcgtggttgtgtgtggcgggttgtgtgcagcgttttgtttgattttgggtgggttgtcaaaataggaccgagtgtagctcacatgtcagttggtagagctattgactgtagtgttctatactgtgtcttagtatacttggaaatcaattggtcgctggttcgattccggccactcggattttattcacgtctcccgttccacgatgcgcccagacccatcccacatgctctggtagcctcacagattgctgccgacagcacagcgaccacaaagcggaatcgcaaaatcagcgtcgacgcgccggccgagtccctgactgggtgactcgggtcgaacttccacgtcctattcgcttacgcgacgtgcaccggcattcacctgtggcaacctacgtcgtcagtcgtcgcgatacgggtgtcgtatgaagcgatacgcattctccgccccgcttgtccatcggaggcgcactgccgacgtcgagcaggtcggcagggtacagacgtctggtcagccgccgtaggcccaaaacacagccgatcatggcgtggacgcggtggcgaggcgccaggccgccgagacagacgtgggcaggtgaatcggggcgtacggagggcgcagaatgaaaaaaggagtgcgcgggagacatggataaaatccgagtggccggaatcgaaccagcgaccaattgatttccgagtatactgagacacagtatagaacactacagtcaatcgctctaccaactgagctacactcggtcctaatttgacaacccacccaaaatcaaacaaaacgctgcacacaacccgccacacacaaccacgcactctacgcacagcacacgcacacgccactcacgacacgcctatccgcatcctactcggcccatacaacgccctacaaaccgaccacacatctcgcgcggacaccgtttccgcaccgactttccgcatcctcttcagctgcatcccatgcttccacgatgcgcccagacccatcccacatgctctggtagcctcacaggttgctgccgacagcacagcgaccacaaagcggaatcgcaaaatcagcgtcgacgcgccggccgagtccctgactgggtgactcgggtcgaacttccacgtcctattcgcttacgcgacgtgcaacggcattcgcctgtggcaacctacgtcgtcagtcgtcgcgatacgggtgtcgtatgaagcgatacgcattctccgccccgcttgtccatcggaggcgcactgccgacgtcgagcaggtcggcagggtgcagacgtctggtcagccgccgtaggcccaaaacacagccgatcatggcgtggacgcggtggcgaggcgccaggccgccgagagagacgtgggcaggtggatcggggcgtacggagggcgcagaatgaaaaaaggagtgcgcgggagacatggataaaatccgagtggccggaatcgaaccagcgaccaattgatttccgagtattctaagacacagtatagaacactacagtcaatcgctctaccaactgagctacactcggtcctaatttgacaacccacccaaaatcaaacaaaacgctgcacacaacccgccacacacaaccacgcactctacgcacagcacacgcacacgccactcacgacacgcctatccgcatcctactcggcccatacaacgccctacaaaccgaccacacatctcgcgcggacaccgtttccgcaccgactttccgcatcctcttcagctgcatcccatgcttccacgatgcgcccagacccatcccacatgctctggtagcctcacaggttgctgccgacagcacagcgaccacaaagcggaatcgcaaaatcagcgtcgacgcgccggccgagtccctgactgggtgactcgggtcgaacttccacgtcctattcgcttacgcgacgtgcaccggcattcgcctgtggcaaccaacgtcgtcagtcgtcgcgatacgggtgtcgtatgaagcgatacgcattctccgccccgcttgtccatcggaggcgcactgccgacgtcgagcaggtcggcagggtgcagacgtctggtcagccgccgtaggcccaaaacacagccgatcatggcgtggacgcggtggcgaggcgccaggccgccgagagagacgtgggcaggcggatcggggcgtacggagggcgcagaatgaaaaaaggaatgcgcgggagacatggataaatcccagtggccggaatcgaaccagcgaccaattgatttccgagtatactgagacacagtatagaacactacagtcaatcgctctaccaactgagctacactcggtcctaatttgacaacccacccaaaatcaaacaaaacgctgcacacaacccgccacacacaaccacgcactctacgcacagcacacgcacacgccactcacgacacgcctatccgcatcctactcggcccatacaacgccctacaaaccgaccacacatctcgcgcggacaccgtttccgcaccgactttccgcatcctcttcagctgcatcccatgcttccacgatgcgcccagacccatcccacatgctctggtagcctcacaggttgctgccgacagcacagcgaccacaaagcggaatcgcaaaatcagcgtcgacgcgccggccgagtccctgactgggtgactcgggtcgaacttccacgtcctattcgcttacgcgacgtgcaccggcattcgcctgtggcaaccaacgtcgtcagtcgtcgcgatacgggtgtcgtatgaagcgatacgcattctccgccccgcttgtccatcggaggcgcactgccgacgtcgagcaggtcggcagggtgcagacgtctggtcagccgccgtaggcccaaaacacagccgatcatggcgtggacgcggtggcgaggcgccaggccgccgagagagacgtgggcaggcggatcggggcgtacggagggcgcagaatgaaaaaaggagtgcgcgggagacatggataaaatccgagtggccggaatcgaaccagcgaccaattgatttccgagtatactgagacacagtatagaacactacagtcaatcgctctaccaactgagctacactcggtcctaatttgacaacccacccaaaatcaaacaaaacgctgcacacaacccgccacacacaaccacgcactctacgcacagcacacgcacacgccactcacgacacgcctatccgcatcctactcggcccatacaacgccctacaaaccgaccacacatctcgcgcggacaccgtttccgcaccgactttccgcatcctcttcagctgcatcccatgcttccacgatgcgcccagacccatcccacatgctctggtagcctcacaggttgctgccgacagcacagcgaccacaaagcggaatcgcaaaatcagcgtcgacgcgccggccgagtccctgactgggtgactcgggtcgaacttccacgtcctattcgcttacgcgacgtgcaacggcattcgcctgtggcaaccaacgtcgtcagtcgtcgcgatacgggtgtcgtatgaagcgatacgcattctccgccccgcttgtccatcggaggcgcactgccgacgtcgagcaggtcggcagggtgcagacgtctggtcagccgccgtaggcccaaaacacagccgatcatggcgtggacgcggtggcgaggcgccaggccgccgagagagacgtgggcaggcggatcggggcgtacggagggcgcagaatgaaaaaaggagtgcgcgggagacatggataaaatccgagtggccggaatcgaaccagcgaccaattgatttccgagtatactaagacacagtatagaacactacagtcaatcgctctaccaactgagctacactcggtcctaatttgacaacccacccaaaatcaaacaaaacgctgcacacaannnnnnnnnnnnnnnnnnnnnnnnnnnnnnnnnnnnnnnnnnnnnnnnnnnnnnnnnnnnnnnnnnnnnnnnnnnnnnnnnnnnnnnnnnnnnnnnnnnnnnnnnnnnnnnnnnnnnnnnnnnnnnnnnnnnnnnnnnnnnnnnnnnnnnnnnnnnnnnnnnnnnnnnnnnnnnnnnnnnnnnnnnnnnnnnnnnnnnnnnnnnnnnnnnnnnnnnnnnnnnnnnnnnnnnnnnnnnnnnnnnnnnnnnnnnnnnnnnnnnnnnnnnnnnnnnnnnnnnnnnnnnnnnnnnnnnnnnnnnnnnnnnnnnnnnnnnnnnnnnnnnnnnnnnnnnnnnnnnnnnnnnnnnnnnnnnnnnnnnnnnnnnnnnnnnnnnnnnnnnnnnnnnnnnnnnnnnnnnnnnnnnnnnnnnnnnnnnnnnnnnnnnnnnnnnnnnnnnnnnnnnnnnnnnnnnnnnnnnnnnnnnnnnnnnnnnnnnnnnnnnnnnnnnnnnnnnnnnnnnnnnnnnnnnnnnnnnnnnnnnnnnnnnnnnnnnnnnnnnnnnnnnnnnnnnnnnnnnnnnnnnnnnnnnnnnnnnnnnnnnnnnnnnnnnnnnnnnnnnnnnnnnnnnnnnnnnnnnnnnnnnnnnnnnnnnnnnnnnnnnnnnnnnnnnnnnnnnnnnnnnnnnnnnnnnnnnnnnnnnnnnnnnnnnnnnnnnnnnnnnnnnnnnnnnnnnnnnnnnnnnnnnnnnnnnnnnnnnnnnnnnnnnnnnnnnnnnnnnnnnnnnnnnnnnnnnnnnnnnnnnnnnnnnnnnnnnnnnnnnnnnnnnnnnnnnnnnnnnnnnnnnnnnnnnnnnnnnnnnnnnnnnnnnnnnnnnnnnnnnnnnnnnnnnnnnnnnnnnnnnnnnnnnnnnnnnnnnnnnnnnnnnnnnnnnnnnnnnnnnnnnnnnnnnnnnnnnnnnnnnnnnnnnnnnnnnnnnnnnnnnnnnnnnnnnnnnnnnnnnnnnnnnnnnnnnnnnnnnnnnnnnnnnnnnnnnnnnnnnnnnnnnnnnnnnnnnnnnnnnnnnnnnnnnnnnnnnnnnnnnnnnnnnnnnnnnnnnnnnnnnnnnnnnnnnnnnnnnnnnnnnnnnnnnnnnnnnnnnnnnnnnnnnnnnnnnnnnnnnnnnnnnnnnnnnnnnnnnnnnnnnnnnnnnnnnnnnnnnnnnnnnnnnnnnnnnnnnnnnnnnnnnnnnnnnnnnnnnnnnnnnnnnnnnnnnnnnnnnnnnnnnnnnnnnnnnnnnnnnnnnnnnnnnnnnnnnnnnnnnnnnnnnnnnnnnnnnnnnnnnnnnnnnnnnnnnnnnnnnnnnnnnnnnnnnnnnnnnnnnnnnnnnnnnnnnnnnnnnnnnnnnnnnnnnnnnnnnnnnnnnnnnnnnnnnnnnnnnnnnnnnnnnnnnnnnnnnnnnnnnnnnnnnnnnnnnnnnnnnnnnnnnnnnnnnnnnnnnnnnnnnnnnnnnnnnnnnnnnnnnnnnnnnnnnnnnnnnnnnnnnnnnnnnnnnnnnnnnnnnnnnnnnnnnnnnnnnnnnnnnnnnnnnnnnnnnnnnnnnnnnnnnnnnnnnnnnnnnnnnnnnnnnnnnnnnnnnnnnnnnnnnnnnnnnnnnnnnnnnnnnnnnnnnnnnnnnnnnnnnnnnnnnnnnnnnnnnnnnnnnnnnnnnnnnnnnnnnnnnnnnnnnnnnnnnnnnnnnnnnnnnnnnnnnnnnnnnnnnnnnnnnnnnnnnnnnnnnnnnnnnnnnnnnnnnnnnnnnnnnnnnnnnnnnnnnnnnnnnnnnnnnnnnnnnnnnnnnnnnnnnnnnnnnnnnnnnnnnnnnnnnnnnnnnnnnnnnnnnnnnnnnnnnnnnnnnnnnnnnnnnnnnnnnnnnnnnnnnnnnnnnnnnnnnnnnnnnnnnnnnnnnnnnnnnnnnnnnnnnnnnnnnnnnnnnnnnnnnnnnnnnnnnnnnnnnnnnnnnnnnnnnnnnnnnnnnnnnnnnnnnnnnnnnnnnnnnnnnnnnnnnnnnnnnnnnnnnnnnnnnnnnnnnnnnnnnnnnnnnnnnnnnnnnnnnnnnnnnnnnnnnnnnnnnnnnnnnnnnnnnnnnnnnnnnnnnnnnnnnnnnnnnnnnnnnnnnnnnnnnnnnnnnnnnnnnnnnnnnnnnnnnnnnnnnnnnnnnnnnnnnnnnnnnnnnnnnnnnnnnnnnnnnnnnnnnnnnnnnnnnnnnnnnnnnnnnnnnnnnnnnnnnnnnnnnnnnnnnnnnnnnnnnnnnnnnnnnnnnnnnnnnnnnnnnnnnnnnnnnnnnnnnnnnnnnnnnnnnnnnnnnnnnnnnnnnnnnnnnnnnnnnnnnnnnnnnnnnnnnnnnnnnnnnnnnnnnnnnnnnnnnnnnnnnnnnnnnnnnnnnnnnnnnnnnnnnnnnnnnnnnnnnnnnnnnnnnnnnnnnnnnnnnnnnnnnnnnnnnnnnnnnnnnnnnnnnnnnnnnnnnnnnnnnnnnnnnnnnnnnnnnnnnnnnnnnnnnnnnnnnnnnnnnnnnnnnnnnnnnnnnnnnnnnnnnnnnnnnnnnnnnnnnnnnnnnnnnnnnnnnnnnnnnnnnnnnnnnnnnnnnnnnnnnnnnnnnnnnnnnnnnnnnnnnnnnnnnnnnnnnnnnnnnnnnnnnnnnnnnnnnnnnnnnnnnnnnnnnnnnnnnnnnnnnnnnnnnnnnnnnnnnnnnnnnnnnnnnnnnnnnnnnnnnnnnnnnnnnnnnnnnnnnnnnnnnnnnnnnnnnnnnnnnnnnnnnnnnnnnnnnnnnnnnnnnnnnnnnnnnnnnnnnnnnnnnnnnnnnnnnnnnnnnnnnnnnnnnnnnnnnnnnnnnnnnnnnnnnnnnnnnnnnnnnnnnnnnnnnnnnnnnnnnnnnnnnnnnnnnnnnnnnnnnnnnnnnnnnnnnnnnnnnnnnnnnnnnnnnnnnnnnnnnnnnnnnnnnnnnnnnnnnnnnnnnnnnnnnnnnnnnnnnnnnnnnnnnnnnnnnnnnnnnnnnnnnnnnnnnnnnnnnnnnnnnnnnnnnnnnnnnnnnnnnnnnnnnnnnnnnnnnnnnnnnnnnnnnnnnnnnnnnnnnnnnnnnnnnnnnnnnnnnnnnnnnnnnnnnnnnnnnnnnnnnnnnnnnnnnnnnnnnnnnnnnnnnnnnnnnnnnnnnnnnnnnnnnnnnnnnnnnnnnnnnnnnnnnnnnnnnnnnnnnnnnnnnnnnnnnnnnnnnnnnnnnnnnnnnnnnnnnnnnnnnnnnnnnnnnnnnnnnnnnnnnnnnnnnnnnnnnnnnnnnnnnnnnnnnnnnnnnnnnnnnnnnnnnnnnnnnnnnnnnnnnnnnnnnnnnnnnnnnnnnnnnnnnnnnnnnnnnnnnnnnnnnnnnnnnnnnnnnnnnnnnnnnnnnnnnnnnnnnnnnnnnnnnnnnnnnnnnnnnnnnnnnnnnnnnnnnnnnnnnnnnnnnnnnnnnnnnnnnnnnnnnnnnnnnnnnnnnnnnnnnnnnnnnnnnnnnnnnnnnnnnnnnnnnnnnnnnnnnnnnnnnnnnnnnnnnnnnnnnnnnnnnnnnnnnnnnnnnnnnnnnnnnnnnnnnnnnnnnnnnnnnnnnnnnnnnnnnnnnnnnnnnnnnnnnnnnnnnnnnnnnnnnnnnnnnnnnnnnnnnnnnnnnnnnnnnnnnnnnnnnnnnnnnnnnnnnnnnnnnnnnnnnnnnnnnnnnnnnnnnnnnnnnnnnnnnnnnnnnnnnnnnnnnnnnnnnnnnnnnnnnnnnnnnnnnnnnnnnnnnnnnnnnnnnnnnnnnnnnnnnnnnnnnnnnnnnnnnnnnnnnnnnnnnnnnnnnnnnnnnnnnnnnnnnnnnnnnnnnnnnnnnnnnnnnnnnnnnnnnnnnnnnnnnnnnnnnnnnnnnnnnnnnnnnnnnnnnnnnnnnnnnnnnnnnnnnnnnnnnnnnnnnnnnnnnnnnnnnnnnnnnnnnnnnnnnnnnnnnnnnnnnnnnnnnnnnnnnnnnnnnnnnnnnnnnnnnnnnnnnnnnnnnnnnnnnnnnnnnnnnnnnnnnnnnnnnnnnnnnnnnnnnnnnnnnnnnnnnnnnnnnnnnnnnnnnnnnnnnnnnnnnnnnnnnnnnnnnnnnnnnnnnnnnnnnnnnnnnnnnnnnnnnnnnnnnnnnnnnnnnnnnnnnnnnnnnnnnnnnnnnnnnnnnnnnnnnnnnnnnnnnnnnnnnnnnnnnnnnnnnnnnnnnnnnnnnnnnnnnnnnnnnnnnnnnnnnnnnnnnnnnnnnnnnnnnnnnnnnnnnnnnnnnnnnnnnnnnnnnnnnnnnnnnnnnnnnnnnnnnnnnnnnnnnnnnnnnnnnnnnnnnnnnnnnnnnnnnnnnnnnnnnnnnnnnnnnnnnnnnnnnnnnnnnnnnnnnnnnnnnnnnnnnnnnnnnnnnnnnnnnnnnnnnnnnnnnnnnnnnnnnnnnnnnnnnnnnnnnnnnnnnnnnnnnnnnnnnnnnnnnnnnnnnnnnnnnnnnnnnnnnnnnnnnnnnnnnnnnnnnnnnnnnnnnnnnnnnnnnnnnnnnnnnnnnnnnnnnnnnnnnnnnnnnnnnnnnnnnnnnnnnnnnnnnnnnnnnnnnnnnnnnnnnnnnnnnnnnnnnnnnnnnnnnnnnnnnnnnnnnnnnnnnnnnnnnnnnnnnnnnnnnnnnnnnnnnnnnnnnnnnnnnnnnnnnnnnnnnnnnnnnnnnnnnnnnnnnnnnnnnnnnnnnnnnnnnnnnnnnnnnnnnnnnnnnnnnnnnnnnnnnnnnnnnnnnnnnnnnnnnnnnnnnnnnnnnnnnnnnnnnnnnnnnnnnnnnnnnnnnnnnnnnnnnnnnnnnnnnnnnnnnnnnnnnnnnnnnnnnnnnnnnnnnnnnnnnnnnnnnnnnnnnnnnnnnnnnnnnnnnnnnnnnnnnnnnnnnnnnnnnnnnnnnnnnnnnnnnnnnnnnnnnnnnnnnnnnnnnnnnnnnnnnnnnnnnnnnnnnnnnnnnnnnnnnnnnnnnnnnnnnnnnnnnnnnnnnnnnnnnnnnnnnnnnnnnnnnnnnnnnnnnnnnnnnnnnnnnnnnnnnnnnnnnnnnnnnnnnnnnnnnnnnnnnnnnnnnnnnnnnnnnnnnnnnnnnnnnnnnnnnnnnnnnnnnnnnnnnnnnnnnnnnnnnnnnnnnnnnnnnnnnnnnnnnnnnnnnnnnnnnnnnnnnnnnnnnnnnnnnnnnnnnnnnnnnnnnnnnnnnnnnnnnnnnnnnnnnnnnnnnnnnnnnnnnnnnnnnnnnnnnnnnnnnnnnnnnnnnnnnnnnnnnnnnnnnnnnnnnnnnnnnnnnnnnnnnnnnnnnnnnnnnnnnnnnnnnnnnnnnnnnnnnnnnnnnnnnnnnnnnnnnnnnnnnnnnnnnnnnnnnnnnnnnnnnnnnnnnnnnnnnnnnnnnnnnnnnnnnnnnnnnnnnnnnnnnnnnnnnnnnnnnnnnnnnnnnnnnnnnnnnnnnnnnnnnnnnnnnnnnnnnnnnnnnnnnnnnnnnnnnnnnnnnnnnnnnnnnnnnnnnnnnnnnnnnnnnnnnnnnnnnnnnnnnnnnnnnnnnnnnnnnnnnnnnnnnnnnnnnnnnnnnnnnnnnnnnnnnnnnnnnnnnnnnnnnnnnnnnnnnnnnnnnnnnnnnnnnnnnnnnnnnnnnnnnnnnnnnnnnnnnnnnnnnnnnnnnnnnnnnnnnnnnnnnnnnnnnnnnnnnnnnnnnnnnnnnnnnnnnnnnnnnnnnnnnnnnnnnnnnnnnnnnnnnnnnnnnnnnnnnnnnnnnnnnnnnnnnnnnnnnnnnnnnnnnnnnnnnnnnnnnnnnnnnnnnnnnnnnnnnnnnnnnnnnnnnnnnnnnnnnnnnnnnnnnnnnnnnnnnnnnnnnnnnnnnnnnnnnnnnnnnnnnnnnnnnnnnnnnnnnnnnnnnnnnnnnnnnnnnnnnnnnnnnnnnnnnnnnnnnnnnnnnnnnnnnnnnnnnnnnnnnnnnnnnnnnnnnnnnnnnnnnnnnnnnnnnnnnnnnnnnnnnnnnnnnnnnnnnnnnnnnnnnnnnnnnnnnnnnnnnnnnnnnnnnnnnnnnnnnnnnnnnnnnnnnnnnnnnnnnnnnnnnnnnnnnnnnnnnnnnnnnnnnnnnnnnnnnnnnnnnnnnnnnnnnnnnnnnnnnnnnnnnnnnnnnnnnnnnnnnnnnnnnnnnnnnnnnnnnnnnnnnnnnnnnnnnnnnnnnnnnnnnnnnnnnnnnnnnnnnnnnnnnnnnnnnnnnnnnnnnnnnnnnnnnnnnnnnnnnnnnnnnnnnnnnnnnnnnnnnnnnnnnnnnnnnnnnnnnnnnnnnnnnnnnnnnnnnnnnnnnnnnnnnnnnnnnnnnnnnnnnnnnnnnnnnnnnnnnnnnnnnnnnnnnnnnnnnnnnnnnnnnnnnnnnnnnnnnnnnnnnnnnnnnnnnnnnnnnnnnnnnnnnnnnnnnnnnnnnnnnnnnnnnnnnnnnnnnnnnnnnnnnnnnnnnnnnnnnnnnnnnnnnnnnnnnnnnnnnnnnnnnnnnnnnnnnnnnnnnnnnnnnnnnnnnnnnnnnnnnnnnnnnnnnnnnnnnnnnnnnnnnnnnnnnnnnnnnnnnnnnnnnnnnnnnnnnnnnnnnnnnnnnnnnnnnnnnnnnnnnnnnnnnnnnnnnnnnnnnnnnnnnnnnnnnnnnnnnnnnnnnnnnnnnnnnnnnnnnnnnnnnnnnnnnnnnnnnnnnnnnnnnnnnnnnnnnnnnnnnnnnnnnnnnnnnnnnnnnnnnnnnnnnnnnnnnnnnnnnnnnnnnnnnnnnnnnnnnnnnnnnnnnnnnnnnnnnnnnnnnnnnnnnnnnnnnnnnnnnnnnnnnnnnnnnnnnnnnnnnnnnnnnnnnnnnnnnnnnnnnnnnnnnnnnnnnnnnnnnnnnnnnnnnnnnnnnnnnnnnnnnnnnnnnnnnnnnnnnnnnnnnnnnnnnnnnnnnnnnnnnnnnnnnnnnnnnnnnnnnnnnnnnnnnnnnnnnnnnnnnnnnnnnnnnnnnnnnnnnnnnnnnnnnnnnnnnnnnnnnnnnnnnnnnnnnnnnnnnnnnnnnnnnnnnnnnnnnnnnnnnnnnnnnnnnnnnnnnnnnnnnnnnnnnnnnnnnnnnnnnnnnnnnnnnnnnnnnnnnnnnnnnnnnnnnnnnnnnnnnnnnnnnnnnnnnnnnnnnnnnnnnnnnnnnnnnnnnnnnnnnnnnnnnnnnnnnnnnnnnnnnnnnnnnnnnnnnnnnnnnnnnnnnnnnnnnnnnnnnnnnnnnnnnnnnnnnnnnnnnnnnnnnnnnnnnnnnnnnnnnnnnnnnnnnnnnnnnnnnnnnnnnnnnnnnnnnnnnnnnnnnnnnnnnnnnnnnnnnnnnnnnnnnnnnnnnnnnnnnnnnnnnnnnnnnnnnnnnnnnnnnnnnnnnnnnnnnnnnnnnnnnnnnnnnnnnnnnnnnnnnnnnnnnnnnnnnnnnnnnnnnnnnnnnnnnnnnnnnnnnnnnnnnnnnnnnnnnnnnnnnnnnnnnnnnnnnnnnnnnnnnnnnnnnnnnnnnnnnnnnnnnnnnnnnnnnnnnnnnnnnnnnnnnnnnnnnnnnnnnnnnnnnnnnnnnnnnnnnnnnnnnnnnnnnnnnnnnnnnnnnnnnnnnnnnnnnnnnnnnnnnnnnnnnnnnnnnnnnnnnnnnnnnnnnnnnnnnnnnnnnnnnnnnnnnnnnnnnnnnnnnnnnnnnnnnnnnnnnnnnnnnnnnnnnnnnnnnnnnnnnnnnnnnnnnnnnnnnnnnnnnnnnnnnnnnnnnnnnnnnnnnnnnnnnnnnnnnnnnnnnnnnnnnnnnnnnnnnnnnnnnnnnnnnnnnnnnnnnnnnnnnnnnnnnnnnnnnnnnnnnnnnnnnnnnnnnnnnnnnnnnnnnnnnnnnnnnnnnnnnnnnnnnnnnnnnnnnnnnnnnnnnnnnnnnnnnnnnnnnnnnnnnnnnnnnnnnnnnnnnnnnnnnnnnnnnnnnnnnnnnnnnnnnnnnnnnnnnnnnnnnnnnnnnnnnnnnnnnnnnnnnnnnnnnnnnnnnnnnnnnnnnnnnnnnnnnnnnnnnnnnnnnnnnnnnnnnnnnnnnnnnnnnnnnnnnnnnnnnnnnnnnnnnnnnnnnnnnnnnnnnnnnnnnnnnnnnnnnnnnnnnnnnnnnnnnnnnnnnnnnnnnnnnnnnnnnnnnnnnnnnnnnnnnnnnnnnnnnnnnnnnnnnnnnnnnnnnnnnnnnnnnnnnnnnnnnnnnnnnnnnnnnnnnnnnnnnnnnnnnnnnnnnnnnnnnnnnnnnnnnnnnnnnnnnnnnnnnnnnnnnnnnnnnnnnnnnnnnnnnnnnnnnnnnnnnnnnnnnnnnnnnnnnnnnnnnnnnnnnnnnnnnnnnnnnnnnnnnnnnnnnnnnnnnnnnnnnnnnnnnnnnnnnnnnnnnnnnnnnnnnnnnnnnnnnnnnnnnnnnnnnnnnnnnnnnnnnnnnnnnnnnnnnnnnnnnnnnnnnnnnnnnnnnnnnnnnnnnnnnnnnnnnnnnnnnnnnnnnnnnnnnnnnnnnnnnnnnnnnnnnnnnnnnnnnnnnnnnnnnnnnnnnnnnnnnnnnnnnnnnnnnnnnnnnnnnnnnnnnnnnnnnnnnnnnnnnnnnnnnnnnnnnnnnnnnnnnnnnnnnnnnnnnnnnnnnnnnnnnnnnnnnnnnnnnnnnnnnnnnnnnnnnnnnnnnnnnnnnnnnnnnnnnnnnnnnnnnnnnnnnnnnnnnnnnnnnnnnnnnnnnnnnnnnnnnnnnnnnnnnnnnnnnnnnnnnnnnnnnnnnnnnnnnnnnnnnnnnnnnnnnnnnnnnnnnnnnnnnnnnnnnnnnnnnnnnnnnnnnnnnnnnnnnnnnnnnnnnnnnnnnnnnnnnnnnnnnnnnnnnnnnnnnnnnnnnnnnnnnnnnnnnnnnnnnnnnnnnnnnnnnnnnnnnnnnnnnnnnnnnnnnnnnnnnnnnnnnnnnnnnnnnnnnnnnnnnnnnnnnnnnnnnnnnnnnnnnnnnnnnnnnnnnnnnnnnnnnnnnnnnnnnnnnnnnnnnnnnnnnnnnnnnnnnnnnnnnnnnnnnnnnnnnnnnnnnnnnnnnnnnnnnnnnnnnnnnnnnnnnnnnnnnnnnnnnnnnnnnnnnnnnnnnnnnnnnnnnnnnnnnnnnnnnnnnnnnnnnnnnnnnnnnnnnnnnnnnnnnnnnnnnnnnnnnnnnnnnnnnnnnnnnnnnnnnnnnnnnnnnnnnnnnnnnnnnnnnnnnnnnnnnnnnnnnnnnnnnnnnnnnnnnnnnnnnnnnnnnnnnnnnnnnnnnnnnnnnnnnnnnnnnnnnnnnnnnnnnnnnnnnnnnnnnnnnnnnnnnnnnnnnnnnnnnnnnnnnnnnnnnnnnnnnnnnnnnnnnnnnnnnnnnnnnnnnnnnnnnnnnnnnnnnnnnnnnnnnnnnnnnnnnnnnnnnnnnnnnnnnnnnnnnnnnnnnnnnnnnnnnnnnnnnnnnnnnnnnnnnnnnnnnnnnnnnnnnnnnnnnnnnnnnnnnnnnnnnnnnnnnnnnnnnnnnnnnnnnnnnnnnnnnnnnnnnnnnnnnnnnnnnnnnnnnnnnnnnnnnnnnnnnnnnnnnnnnnnnnnnnnnnnnnnnnnnnnnnnnnnnnnnnnnnnnnnnnnnnnnnnnnnnnnnnnnnnnnnnnnnnnnnnnnnnnnnnnnnnnnnnnnnnnnnnnnnnnnnnnnnnnnnnnnnnnnnnnnnnnnnnnnnnnnnnnnnnnnnnnnnnnnnnnnnnnnnnnnnnnnnnnnnnnnnnnnnnnnnnnnnnnnnnnnnnnnnnnnnnnnnnnnnnnnnnnnnnnnnnnnnnnnnnnnnnnnnnnnnnnnnnnnnnnnnnnnnnnnnnnnnnnnnnnnnnnnnnnnnnnnnnnnnnnnnnnnnnnnnnnnnnnnnnnnnnnnnnnnnnnnnnnnnnnnnnnnnnnnnnnnnnnnnnnnnnnnnnnnnnnnnnnnnnnnnnnnnnnnnnnnnnnnnnnnnnnnnnnnnnnnnnnnnnnnnnnnnnnnnnnnnnnnnnnnnnnnnnnnnnnnnnnnnnnnnnnnnnnnnnnnnnnnnnnnnnnnnnnnnnnnnnnnnnnnnnnnnnnnnnnnnnnnnnnnnnnnnnnnnnnnnnnnnnnnnnnnnnnnnnnnnnnnnnnnnnnnnnnnnnnnnnnnnnnnnnnnnnnnnnnnnnnnnnnnnnnnnnnnnnnnnnnnnnnnnnnnnnnnnnnnnnnnnnnnnnnnnnnnnnnnnnnnnnnnnnnnnnnnnnnnnnnnnnnnnnnnnnnnnnnnnnnnnnnnnnnnnnnnnnnnnnnnnnnnnnnnnnnnnnnnnnnnnnnnnnnnnnnnnnnnnnnnnnnnnnnnnnnnnnnnnnnnnnnnnnnnnnnnnnnnnnnnnnnnnnnnnnnnnnnnnnnnnnnnnnnnnnnnnnnnnnnnnnnnnnnnnnnnnnnnnnnnnnnnnnnnnnnnnnnnnnnnnnnnnnnnnnnnnnnnnnnnnnnnnnnnnnnnnnnnnnnnnnnnnnnnnnnnnnnnnnnnnnnnnnnnnnnnnnnnnnnnnnnnnnnnnnnnnnnnnnnnnnnnnnnnnnnnnnnnnnnnnnnnnnnnnnnnnnnnnnnnnnnnnnnnnnnnnnnnnnnnnnnnnnnnnnnnnnnnnnnnnnnnnnnnnnnnnnnnnnnnnnnnnnnnnnnnnnnnnnnnnnnnnnnnnnnnnnnnnnnnnnnnnnnnnnnnnnnnnnnnnnnnnnnnnnnnnnnnnnnnnnnnnnnnnnnnnnnnnnnnnnnnnnnnnnnnnnnnnnnnnnnnnnnnnnnnnnnnnnnnnnnnnnnnnnnnnnnnnnnnnnnnnnnnnnnnnnnnnnnnnnnnnnnnnnnnnnnnnnnnnnnnnnnnnnnnnnnnnnnnnnnnnnnnnnnnnnnnnnnnnnnnnnnnnnnnnnnnnnnnnnnnnnnnnnnnnnnnnnnnnnnnnnnnnnnnnnnnnnnnnnnnnnnnnnnnnnnnnnnnnnnnnnnnnnnnnnnnnnnnnnnnnnnnnnnnnnnnnnnnnnnnnnnnnnnnnnnnnnnnnnnnnnnnnnnnnnnnnnnnnnnnnnnnnnnnnnnnnnnnnnnnnnnnnnnnnnnnnnnnnnnnnnnnnnnnnnnnnnnnnnnnnnnnnnnnnnnnnnnnnnnnnnnnnnnnnnnnnnnnnnnnnnnnnnnnnnnnnnnnnnnnnnnnnnnnnnnnnnnnnnnnnnnnnnnnnnnnnnnnnnnnnnnnnnnnnnnnnnnnnnnnnnnnnnnnnnnnnnnnnnnnnnnnnnnnnnnnnnnnnnnnnnnnnnnnnnnnnnnnnnnnnnnnnnnnnnnnnnnnnnnnnnnnnnnnnnnnnnnnnnnnnnnnnnnnnnnnnnnnnnnnnnnnnnnnnnnnnnnnnnnnnnnnnnnnnnnnnnnnnnnnnnnnnnnnnnnnnnnnnnnnnnnnnnnnnnnnnnnnnnnnnnnnnnnnnnnnnnnnnnnnnnnnnnnnnnnnnnnnnnnnnnnnnnnnnnnnnnnnnnnnnnnnnnnnnnnnnnnnnnnnnnnnnnnnnnnnnnnnnnnnnnnnnnnnnnnnnnnnnnnnnnnnnnnnnnnnnnnnnnnnnnnnnnnnnnnnnnnnnnnnnnnnnnnnnnnnnnnnnnnnnnnnnnnnnnnnnnnnnnnnnnnnnnnnnnnnnnnnnnnnnnnnnnnnnnnnnnnnnnnnnnnnnnnnnnnnnnnnnnnnnnnnnnnnnnnnnnnnnnnnnnnnnnnnnnnnnnnnnnnnnnnnnnnnnnnnnnnnnnnnnnnnnnnnnnnnnnnnnnnnnnnnnnnnnnnnnnnnnnnnnnnnnnnnnnnnnnnnnnnnnnnnnnnnnnnnnnnnnnnnnnnnnnnnnnnnnnnnnnnnnnnnnnnnnnnnnnnnnnnnnnnnnnnnnnnnnnnnnnnnnnnnnnnnnnnnnnnnnnnnnnnnnnnnnnnnnnnnnnnnnnnnnnnnnnnnnnnnnnnnnnnnnnnnnnnnnnnnnnnnnnnnnnnnnnnnnnnnnnnnnnnnnnnnnnnnnnnnnnnnnnnnnnnnnnnnnnnnnnnnnnnnnnnnnnnnnnnnnnnnnnnnnnnnnnnnnnnnnnnnnnnnnnnnnnnnnnnnnnnnnnnnnnnnnnnnnnnnnnnnnnnnnnnnnnnnnnnnnnnnnnnnnnnnnnnnnnnnnnnnnnnnnnnnnnnnnnnnnnnnnnnnnnnnnnnnnnnnnnnnnnnnnnnnnnnnnnnnnnnnnnnnnnnnnnnnnnnnnnnnnnnnnnnnnnnnnnnnnnnnnnnnnnnnnnnnnnnnnnnnnnnnnnnnnnnnnnnnnnnnnnnnnnnnnnnnnnnnnnnnnnnnnnnnnnnnnnnnnnnnnnnnnnnnnnnnnnnnnnnnnnnnnnnnnnnnnnnnnnnnnnnnnnnnnnnnnnnnnnnnnnnnnnnnnnnnnnnnnnnnnnnnnnnnnnnnnnnnnnnnnnnnnnnnnnnnnnnnnnnnnnnnnnnnnnnnnnnnnnnnnnnnnnnnnnnnnnnnnnnnnnnnnnnnnnnnnnnnnnnnnnnnnnnnnnnnnnnnnnnnnnnnnnnnnnnnnnnnnnnnnnnnnnnnnnnnnnnnnnnnnnnnnnnnnnnnnnnnnnnnnnnnnnnnnnnnnnnnnnnnnnnnnnnnnnnnnnnnnnnnnnnnnnnnnnnnnnnnnnnnnnnnnnnnnnnnnnnnnnnnnnnnnnnnnnnnnnnnnnnnnnnnnnnnnnnnnnnnnnnnnnnnnnnnnnnnnnnnnnnnnnnnnnnnnnnnnnnnnnnnnnnnnnnnnnnnnnnnnnnnnnnnnnnnnnnnnnnnnnnnnnnnnnnnnnnnnnnnnnnnnnnnnnnnnnnnnnnnnnnnnnnnnnnnnnnnnnnnnnnnnnnnnnnnnnnnnnnnnnnnnnnnnnnnnnnnnnnnnnnnnnnnnnnnnnnnnnnnnnnnnnnnnnnnnnnnnnnnnnnnnnnnnnnnnnnnnnnnnnnnnnnnnnnnnnnnnnnnnnnnnnnnnnnnnnnnnnnnnnnnnnnnnnnnnnnnnnnnnnnnnnnnnnnnnnnnnnnnnnnnnnnnnnnnnnnnnnnnnnnnnnnnnnnnnnnnnnnnnnnnnnnnnnnnnnnnnnnnnnnnnnnnnnnnnnnnnnnnnnnnnnnnnnnnnnnnnnnnnnnnnnnnnnnnnnnnnnnnnnnnnnnnnnnnnnnnnnnnnnnnnnnnnnnnnnnnnnnnnnnnnnnnnnnnnnnnnnnnnnnnnnnnnnnnnnnnnnnnnnnnnnnnnnnnnnnnnnnnnnnnnnnnnnnnnnnnnnnnnnnnnnnnnnnnnnnnnnnnnnnnnnnnnnnnnnnnnnnnnnnnnnnnnnnnnnnnnnnnnnnnnnnnnnnnnnnnnnnnnnnnnnnnnnnnnnnnnnnnnnnnnnnnnnnnnnnnnnnnnnnnnnnnnnnnnnnnnnnnnnnnnnnnnnnnnnnnnnnnnnnnnnnnnnnnnnnnnnnnnnnnnnnnnnnnnnnnnnnnnnnnnnnnnnnnnnnnnnnnnnnnnnnnnnnnnnnnnnnnnnnnnnnnnnnnnnnnnnnnnnnnnnnnnnnnnnnnnnnnnnnnnnnnnnnnnnnnnnnnnnnnnnnnnnnnnnnnnnnnnnnnnnnnnnnnnnnnnnnnnnnnnnnnnnnnnnnnnnnnnnnnnnnnnnnnnnnnnnnnnnnnnnnnnnnnnnnnnnnnnnnnnnnnnnnnnnnnnnnnnnnnnnnnnnnnnnnnnnnnnnnnnnnnnnnnnnnnnnnnnnnnnnnnnnnnnnnnnnnnnnnnnnnnnnnnnnnnnnnnnnnnnnnnnnnnnnnnnnnnnnnnnnnnnnnnnnnnnnnnnnnnnnnnnnnnnnnnnnnnnnnnnnnnnnnnnnnnnnnnnnnnnnnnnnnnnnnnnnnnnnnnnnnnnnnnnnnnnnnnnnnnnnnnnnnnnnnnnnnnnnnnnnnnnnnnnnnnnnnnnnnnnnnnnnnnnnnnnnnnnnnnnnnnnnnnnnnnnnnnnnnnnnnnnnnnnnnnnnnnnnnnnnnnnnnnnnnnnnnnnnnnnnnnnnnnnnnnnnnnnnnnnnnnnnnnnnnnnnnnnnnnnnnnnnnnnnnnnnnnnnnnnnnnnnnnnnnnnnnnnnnnnnnnnnnnnnnnnnnnnnnnnnnnnnnnnnnnnnnnnnnnnnnnnnnnnnnnnnnnnnnnnnnnnnnnnnnnnnnnnnnnnnnnnnnnnnnnnnnnnnnnnnnnnnnnnnnnnnnnnnnnnnnnnnnnnnnnnnnnnnnnnnnnnnnnnnnnnnnnnnnnnnnnnnnnnnnnnnnnnnnnnnnnnnnnnnnnnnnnnnnnnnnnnnnnnnnnnnnnnnnnnnnnnnnnnnnnnnnnnnnnnnnnnnnnnnnnnnnnnnnnnnnnnnnnnnnnnnnnnnnnnnnnnnnnnnnnnnnnnnnnnnnnnnnnnnnnnnnnnnnnnnnnnnnnnnnnnnnnnnnnnnnnnnnnnnnnnnnnnnnnnnnnnnnnnnnnnnnnnnnnnnnnnnnnnnnnnnnnnnnnnnnnnnnnnnnnnnnnnnnnnnnnnnnnnnnnnnnnnnnnnnnnnnnnnnnnnnnnnnnnnnnnnnnnnnnnnnnnnnnnnnnnnnnnnnnnnnnnnnnnnnnnnnnnnnnnnnnnnnnnnnnnnnnnnnnnnnnnnnnnnnnnnnnnnnnnnnnnnnnnnnnnnnnnnnnnnnnnnnnnnnnnnnnnnnnnnnnnnnnnnnnnnnnnnnnnnnnnnnnnnnnnnnnnnnnnnnnnnnnnnnnnnnnnnnnnnnnnnnnnnnnnnnnnnnnnnnnnnnnnnnnnnnnnnnnnnnnnnnnnnnnnnnnnnnnnnnnnnnnnnnnnnnnnnnnnnnnnnnnnnnnnnnnnnnnnnnnnnnnnnnnnnnnnnnnnnnnnnnnnnnnnnnnnnnnnnnnnnnnnnnnnnnnnnnnnnnnnnnnnnnnnnnnnnnnnnnnnnnnnnnnnnnnnnnnnnnnnnnnnnnnnnnnnnnnnnnnnnnnnnnnnnnnnnnnnnnnnnnnnnnnnnnnnnnnnnnnnnnnnnnnnnnnnnnnnnnnnnnnnnnnnnnnnnnnnnnnnnnnnnnnnnnnnnnnnnnnnnnnnnnnnnnnnnnnnnnnnnnnnnnnnnnnnnnnnnnnnnnnnnnnnnnnnnnnnnnnnnnnnnnnnnnnnnnnnnnnnnnnnnnnnnnnnnnnnnnnnnnnnnnnnnnnnnnnnnnnnnnnnnnnnnnnnnnnnnnnnnnnnnnnnnnnnnnnnnnnnnnnnnnnnnnnnnnnnnnnnnnnnnnnnnnnnnnnnnnnnnnnnnnnnnnnnnnnnnnnnnnnnnnnnnnnnnnnnnnnnnnnnnnnnnnnnnnnnnnnnnnnnnnnnnnnnnnnnnnnnnnnnnnnnnnnnnnnnnnnnnnnnnnnnnnnnnnnnnnnnnnnnnnnnnnnnnnnnnnnnnnnnnnnnnnnnnnnnnnnnnnnnnnnnnnnnnnnnnnnnnnnnnnnnnnnnnnnnnnnnnnnnnnnnnnnnnnnnnnnnnnnnnnnnnnnnnnnnnnnnnnnnnnnnnnnnnnnnnnnnnnnnnnnnnnnnnnnnnnnnnnnnnnnnnnnnnnnnnnnnnnnnnnnnnnnnnnnnnnnnnnnnnnnnnnnnnnnnnnnnnnnnnnnnnnnnnnnnnnnnnnnnnnnnnnnnnnnnnnnnnnnnnnnnnnnnnnnnnnnnnnnnnnnnnnnnnnnnnnnnnnnnnnnnnnnnnnnnnnnnnnnnnnnnnnnnnnnnnnnnnnnnnnnnnnnnnnnnnnnnnnnnnnnnnnnnnnnnnnnnnnnnnnnnnnnnnnnnnnnnnnnnnnnnnnnnnnnnnnnnnnnnnnnnnnnnnnnnnnnnnnnnnnnnnnnnnnnnnnnnnnnnnnnnnnnnnnnnnnnnnnnnnnnnnnnnnnnnnnnnnnnnnnnnnnnnnnnnnnnnnnnnnnnnnnnnnnnnnnnnnnnnnnnnnnnnnnnnnnnnnnnnnnnnnnnnnnnnnnnnnnnnnnnnnnnnnnnnnnnnnnnnnnnnnnnnnnnnnnnnnnnnnnnnnnnnnnnnnnnnnnnnnnnnnnnnnnnnnnnnnnnnnnnnnnnnnnnnnnnnnnnnnnnnnnnnnnnnnnnnnnnnnnnnnnnnnnnnnnnnnnnnnnnnnnnnnnnnnnnnnnnnnnnnnnnnnnnnnnnnnnnnnnnnnnnnnnnnnnnnnnnnnnnnnnnnnnnnnnnnnnnnnnnnnnnnnnnnnnnnnnnnnnnnnnnnnnnnnnnnnnnnnnnnnnnnnnnnnnnnnnnnnnnnnnnnnnnnnnnnnnnnnnnnnnnnnnnnnnnnnnnnnnnnnnnnnnnnnnnnnnnnnnnnnnnnnnnnnnnnnnnnnnnnnnnnnnnnnnnnnnnnnnnnnnnnnnnnnnnnnnnnnnnnnnnnnnnnnnnnnnnnnnnnnnnnnnnnnnnnnnnnnnnnnnnnnnnnnnnnnnnnnnnnnnnnnnnnnnnnnnnnnnnnnnnnnnnnnnnnnnnnnnnnnnnnnnnnnnnnnnnnnnnnnnnnnnnnnnnnnnnnnnnnnnnnnnnnnnnnnnnnnnnnnnnnnnnnnnnnnnnnnnnnnnnnnnnnnnnnnnnnnnnnnnnnnnnnnnnnnnnnnnnnnnnnnnnnnnnnnnnnnnnnnnnnnnnnnnnnnnnnnnnnnnnnnnnnnnnnnnnnnnnnnnnnnnnnnnnnnnnnnnnnnnnnnnnnnnnnnnnnnnnnnnnnnnnnnnnnnnnnnnnnnnnnnnnnnnnnnnnnnnnnnnnnnnnnnnnnnnnnnnnnnnnnnnnnnnnnnnnnnnnnnnnnnnnnnnnnnnnnnnnnnnnnnnnnnnnnnnnnnnnnnnnnnnnnnnnnnnnnnnnnnnnnnnnnnnnnnnnnnnnnnnnnnnnnnnnnnnnnnnnnnnnnnnnnnnnnnnnnnnnnnnnnnnnnnnnnnnnnnnnnnnnnnnnnnnnnnnnnnnnnnnnnnnnnnnnnnnnnnnnnnnnnnnnnnnnnnnnnnnnnnnnnnnnnnnnnnnnnnnnnnnnnnnnnnnnnnnnnnnnnnnnnnnnnnnnnnnnnnnnnnnnnnnnnnnnnnnnnnnnnnnnnnnnnnnnnnnnnnnnnnnnnnnnnnnnnnnnnnnnnnnnnnnnnnnnnnnnnnnnnnnnnnnnnnnnnnnnnnnnnnnnnnnnnnnnnnnnnnnnnnnnnnnnnnnnnnnnnnnnnnnnnnnnnnnnnnnnnnnnnnnnnnnnnnnnnnnnnnnnnnnnnnnnnnnnnnnnnnnnnnnnnnnnnnnnnnnnnnnnnnnnnnnnnnnnnnnnnnnnnnnnnnnnnnnnnnnnnnnnnnnnnnnnnnnnnnnnnnnnnnnnnnnnnnnnnnnnnnnnnnnnnnnnnnnnnnnnnnnnnnnnnnnnnnnnnnnnnnnnnnnnnnnnnnnnnnnnnnnnnnnnnnnnnnnnnnnnnnnnnnnnnnnnnnnnnnnnnnnnnnnnnnnnnnnnnnnnnnnnnnnnnnnnnnnnnnnnnnnnnnnnnnnnnnnnnnnnnnnnnnnnnnnnnnnnnnnnnnnnnnnnnnnnnnnnnnnnnnnnnnnnnnnnnnnnnnnnnnnnnnnnnnnnnnnnnnnnnnnnnnnnnnnnnnnnnnnnnnnnnnnnnnnnnnnnnnnnnnnnnnnnnnnnnnnnnnnnnnnnnnnnnnnnnnnnnnnnnnnnnnnnnnnnnnnnnnnnnnnnnnnnnnnnnnnnnnnnnnnnnnnnnnnnnnnnnnnnnnnnnnnnnnnnnnnnnnnnnnnnnnnnnnnnnnnnnnnnnnnnnnnnnnnnnnnnnnnnnnnnnnnnnnnnnnnnnnnnnnnnnnnnnnnnnnnnnnnnnnnnnnnnnnnnnnnnnnnnnnnnnnnnnnnnnnnnnnnnnnnnnnnnnnnnnnnnnnnnnnnnnnnnnnnnnnnnnnnnnnnnnnnnnnnnnnnnnnnnnnnnnnnnnnnnnnnnnnnnnnnnnnnnnnnnnnnnnnnnnnnnnnnnnnnnnnnnnnnnnnnnnnnnnnnnnnnnnnnnnnnnnnnnnnnnnnnnnnnnnnnnnnnnnnnnnnnnnnnnnnnnnnnnnnnnnnnnnnnnnnnnnnnnnnnnnnnnnnnnnnnnnnnnnnnnnnnnnnnnnnnnnnnnnnnnnnnnnnnnnnnnnnnnnnnnnnnnnnnnnnnnnnnnnnnnnnnnnnnnnnnnnnnnnnnnnnnnnnnnnnnnnnnnnnnnnnnnnnnnnnnnnnnnnnnnnnnnnnnnnnnnnnnnnnnnnnnnnnnnnnnnnnnnnnnnnnnnnnnnnnnnnnnnnnnnnnnnnnnnnnnnnnnnnnnnnnnnnnnnnnnnnnnnnnnnnnnnnnnnnnnnnnnnnnnnnnnnnnnnnnnnnnnnnnnnnnnnnnnnnnnnnnnnnnnnnnnnnnnnnnnnnnnnnnnnnnnnnnnnnnnnnnnnnnnnnnnnnnnnnnnnnnnnnnnnnnnnnnnnnnnnnnnnnnnnnnnnnnnnnnnnnnnnnnnnnnnnnnnnnnnnnnnnnnnnnnnnnnnnnnnnnnnnnnnnnnnnnnnnnnnnnnnnnnnnnnnnnnnnnnnnnnnnnnnnnnnnnnnnnnnnnnnnnnnnnnnnnnnnnnnnnnnnnnnnnnnnnnnnnnnnnnnnnnnnnnnnnnnnnnnnnnnnnnnnnnnnnnnnnnnnnnnnnnnnnnnnnnnnnnnnnnnnnnnnnnnnnnnnnnnnnnnnnnnnnnnnnnnnnnnnnnnnnnnnnnnnnnnnnnnnnnnnnnnnnnnnnnnnnnnnnnnnnnnnnnnnnnnnnnnnnnnnnnnnnnnnnnnnnnnnnnnnnnnnnnnnnnnnnnnnnnnnnnnnnnnnnnnnnnnnnnnnnnnnnnnnnnnnnnnnnnnnnnnnnnnnnnnnnnnnnnnnnnnnnnnnnnnnnnnnnnnnnnnnnnnnnnnnnnnnnnnnnnnnnnnnnnnnnnnnnnnnnnnnnnnnnnnnnnnnnnnnnnnnnnnnnnnnnnnnnnnnnnnnnnnnnnnnnnnnnnnnnnnnnnnnnnnnnnnnnnnnnnnnnnnnnnnnnnnnnnnnnnnnnnnnnnnnnnnnnnnnnnnnnnnnnnnnnnnnnnnnnnnnnnnnnnnnnnnnnnnnnnnnnnnnnnnnnnnnnnnnnnnnnnnnnnnnnnnnnnnnnnnnnnnnnnnnnnnnnnnnnnnnnnnnnnnnnnnnnnnnnnnnnnnnnnnnnnnnnnnnnnnnnnnnnnnnnnnnnnnnnnnnnnnnnnnnnnnnnnnnnnnnnnnnnnnnnnnnnnnnnnnnnnnnnnnnnnnnnnnnnnnnnnnnnnnnnnnnnnnnnnnnnnnnnnnnnnnnnnnnnnnnnnnnnnnnnnnnnnnnnnnnnnnnnnnnnnnnnnnnnnnnnnnnnnnnnnnnnnnnnnnnnnnnnnnnnnnnnnnnnnnnnnnnnnnnnnnnnnnnnnnnnnnnnnnnnnnnnnnnnnnnnnnnnnnnnnnnnnnnnnnnnnnnnnnnnnnnnnnnnnnnnnnnnnnnnnnnnnnnnnnnnnnnnnnnnnnnnnnnnnnnnnnnnnnnnnnnnnnnnnnnnnnnnnnnnnnnnnnnnnnnnnnnnnnnnnnnnnnnnnnnnnnnnnnnnnnnnnnnnnnnnnnnnnnnnnnnnnnnnnnnnnnnnnnnnnnnnnnnnnnnnnnnnnnnnnnnnnnnnnnnnnnnnnnnnnnnnnnnnnnnnnnnnnnnnnnnnnnnnnnnnnnnnnnnnnnnnnnnnnnnnnnnnnnnnnnnnnnnnnnnnnnnnnnnnnnnnnnnnnnnnnnnnnnnnnnnnnnnnnnnnnnnnnnnnnnnnnnnnnnnnnnnnnnnnnnnnnnnnnnnnnnnnnnnnnnnnnnnnnnnnnnnnnnnnnnnnnnnnnnnnnnnnnnnnnnnnnnnnnnnnnnnnnnnnnnnnnnnnnnnnnnnnnnnnnnnnnnnnnnnnnnnnnnnnnnnnnnnnnnnnnnnnnnnnnnnnnnnnnnnnnnnnnnnnnnnnnnnnnnnnnnnnnnnnnnnnnnnnnnnnnnnnnnnnnnnnnnnnnnnnnnnnnnnnnnnnnnnnnnnnnnnnnnnnnnnnnnnnnnnnnnnnnnnnnnnnnnnnnnnnnnnnnnnnnnnnnnnnnnnnnnnnnnnnnnnnnnnnnnnnnnnnnnnnnnnnnnnnnnnnnnnnnnnnnnnnnnnnnnnnnnnnnnnnnnnnnnnnnnnnnnnnnnnnnnnnnnnnnnnnnnnnnnnnnnnnnnnnnnnnnnnnnnnnnnnnnnnnnnnnnnnnnnnnnnnnnnnnnnnnnnnnnnnnnnnnnnnnnnnnnnnnnnnnnnnnnnnnnnnnnnnnnnnnnnnnnnnnnnnnnnnnnnnnnnnnnnnnnnnnnnnnnnnnnnnnnnnnnnnnnnnnnnnnnnnnnnnnnnnnnnnnnnnnnnnnnnnnnnnnnnnnnnnnnnnnnnnnnnnnnnnnnnnnnnnnnnnnnnnnnnnnnnnnnnnnnnnnnnnnnnnnnnnnnnnnnnnnnnnnnnnnnnnnnnnnnnnnnnnnnnnnnnnnnnnnnnnnnnnnnnnnnnnnnnnnnnnnnnnnnnnnnnnnnnnnnnnnnnnnnnnnnnnnnnnnnnnnnnnnnnnnnnnnnnnnnnnnnnnnnnnnnnnnnnnnnnnnnnnnnnnnnnnnnnnnnnnnnnnnnnnnnnnnnnnnnnnnnnnnnnnnnnnnnnnnnnnnnnnnnnnnnnnnnnnnnnnnnnnnnnnnnnnnnnnnnnnnnnnnnnnnnnnnnnnnnnnnnnnnnnnnnnnnnnnnnnnnnnnnnnnnnnnnnnnnnnnnnnnnnnnnnnnnnnnnnnnnnnnnnnnnnnnnnnnnnnnnnnnnnnnnnnnnnnnnnnnnnnnnnnnnnnnnnnnnnnnnnnnnnnnnnnnnnnnnnnnnnnnnnnnnnnnnnnnnnnnnnnnnnnnnnnnnnnnnnnnnnnnnnnnnnnnnnnnnnnnnnnnnnnnnnnnnnnnnnnnnnnnnnnnnnnnnnnnnnnnnnnnnnnnnnnnnnnnnnnnnnnnnnnnnnnnnnnnnnnnnnnnnnnnnnnnnnnnnnnnnnnnnnnnnnnnnnnnnnnnnnnnnnnnnnnnnnnnnnnnnnnnnnnnnnnnnnnnnnnnnnnnnnnnnnnnnnnnnnnnnnnnnnnnnnnnnnnnnnnnnnnnnnnnnnnnnnnnnnnnnnnnnnnnnnnnnnnnnnnnnnnnnnnnnnnnnnnnnnnnnnnnnnnnnnnnnnnnnnnnnnnnnnnnnnnnnnnnnnnnnnnnnnnnnnnnnnnnnnnnnnnnnnnnnnnnnnnnnnnnnnnnnnnnnnnnnnnnnnnnnnnnnnnnnnnnnnnnnnnnnnnnnnnnnnnnnnnnnnnnnnnnnnnnnnnnnnnnnnnnnnnnnnnnnnnnnnnnnnnnnnnnnnnnnnnnnnnnnnnnnnnnnnnnnnnnnnnnnnnnnnnnnnnnnnnnnnnnnnnnnnnnnnnnnnnnnnnnnnnnnnnnnnnnnnnnnnnnnnnnnnnnnnnnnnnnnnnnnnnnnnnnnnnnnnnnnnnnnnnnnnnnnnnnnnnnnnnnnnnnnnnnnnnnnnnnnnnnnnnnnnnnnnnnnnnnnnnnnnnnnnnnnnnnnnnnnnnnnnnnnnnnnnnnnnnnnnnnnnnnnnnnnnnnnnnnnnnnnnnnnnnnnnnnnnnnnnnnnnnnnnnnnnnnnnnnnnnnnnnnnnnnnnnnnnnnnnnnnnnnnnnnnnnnnnnnnnnnnnnnnnnnnnnnnnnnnnnnnnnnnnnnnnnnnnnnnnnnnnnnnnnnnnnnnnnnnnnnnnnnnnnnnnnnnnnnnnnnnnnnnnnnnnnnnnnnnnnnnnnnnnnnnnnnnnnnnnnnnnnnnnnnnnnnnnnnnnnnnnnnnnnnnnnnnnnnnnnnnnnnnnnnnnnnnnnnnnnnnnnnnnnnnnnnnnnnnnnnnnnnnnnnnnnnnnnnnnnnnnnnnnnnnnnnnnnnnnnnnnnnnnnnnnnnnnnnnnnnnnnnnnnnnnnnnnnnnnnnnnnnnnnnnnnnnnnnnnnnnnnnnnnnnnnnnnnnnnnnnnnnnnnnnnnnnnnnnnnnnnnnnnnnnnnnnnnnnnnnnnnnnnnnnnnnnnnnnnnnnnnnnnnnnnnnnnnnnnnnnnnnnnnnnnnnnnnnnnnnnnnnnnnnnnnnnnnnnnnnnnnnnnnnnnnnnnnnnnnnnnnnnnnnnnnnnnnnnnnnnnnnnnnnnnnnnnnnnnnnnnnnnnnnnnnnnnnnnnnnnnnnnnnnnnnnnnnnnnnnnnnnnnnnnnnnnnnnnnnnnnnnnnnnnnnnnnnnnnnnnnnnnnnnnnnnnnnnnnnnnnnnnnnnnnnnnnnnnnnnnnnnnnnnnnnnnnnnnnnnnnnnnnnnnnnnnnnnnnnnnnnnnnnnnnnnnnnnnnnnnnnnnnnnnnnnnnnnnnnnnnnnnnnnnnnnnnnnnnnnnnnnnnnnnnnnnnnnnnnnnnnnnnnnnnnnnnnnnnnnnnnnnnnnnnnnnnnnnnnnnnnnnnnnnnnnnnnnnnnnnnnnnnnnnnnnnnnnnnnnnnnnnnnnnnnnnnnnnnnnnnnnnnnnnnnnnnnnnnnnnnnnnnnnnnnnnnnnnnnnnnnnnnnnnnnnnnnnnnnnnnnnnnnnnnnnnnnnnnnnnnnnnnnnnnnnnnnnnnnnnnnnnnnnnnnnnnnnnnnnnnnnnnnnnnnnnnnnnnnnnnnnnnnnnnnnnnnnnnnnnnnnnnnnnnnnnnnnnnnnnnnnnnnnnnnnnnnnnnnnnnnnnnnnnnnnnnnnnnnnnnnnnnnnnnnnnnnnnnnnnnnnnnnnnnnnnnnnnnnnnnnnnnnnnnnnnnnnnnnnnnnnnnnnnnnnnnnnnnnnnnnnnnnnnnnnnnnnnnnnnnnnnnnnnnnnnnnnnnnnnnnnnnnnnnnnnnnnnnnnnnnnnnnnnnnnnnnnnnnnnnnnnnnnnnnnnnnnnnnnnnnnnnnnnnnnnnnnnnnnnnnnnnnnnnnnnnnnnnnnnnnnnnnnnnnnnnnnnnnnnnnnnnnnnnnnnnnnnnnnnnnnnnnnnnnnnnnnnnnnnnnnnnnnnnnnnnnnnnnnnnnnnnnnnnnnnnnnnnnnnnnnnnnnnnnnnnnnnnnnnnnnnnnnnnnnnnnnnnnnnnnnnnnnnnnnnnnnnnnnnnnnnnnnnnnnnnnnnnnnnnnnnnnnnnnnnnnnnnnnnnnnnnnnnnnnnnnnnnnnnnnnnnnnnnnnnnnnnnnnnnnnnnnnnnnnnnnnnnnnnnnnnnnnnnnnnnnnnnnnnnnnnnnnnnnnnnnnnnnnnnnnnnnnnnnnnnnnnnnnnnnnnnnnnnnnnnnnnnnnnnnnnnnnnnnnnnnnnnnnnnnnnnnnnnnnnnnnnnnnnnnnnnnnnnnnnnnnnnnnnnnnnnnnnnnnnnnnnnnnnnnnnnnnnnnnnnnnnnnnnnnnnnnnnnnnnnnnnnnnnnnnnnnnnnnnnnnnnnnnnnnnnnnnnnnnnnnnnnnnnnnnnnnnnnnnnnnnnnnnnnnnnnnnnnnnnnnnnnnnnnnnnnnnnnnnnnnnnnnnnnnnnnnnnnnnnnnnnnnnnnnnnnnnnnnnnnnnnnnnnnnnnnnnnnnnnnnnnnnnnnnnnnnnnnnnnnnnnnnnnnnnnnnnnnnnnnnnnnnnnnnnnnnnnnnnnnnnnnnnnnnnnnnnnnnnnnnnnnnnnnnnnnnnnnnnnnnnnnnnnnnnnnnnnnnnnnnnnnnnnnnnnnnnnnnnnnnnnnnnnnnnnnnnnnnnnnnnnnnnnnnnnnnnnnnnnnnnnnnnnnnnnnnnnnnnnnnnnnnnnnnnnnnnnnnnnnnnnnnnnnnnnnnnnnnnnnnnnnnnnnnnnnnnnnnnnnnnnnnnnnnnnnnnnnnnnnnnnnnnnnnnnnnnnnnnnnnnnnnnnnnnnnnnnnnnnnnnnnnnnnnnnnnnnnnnnnnnnnnnnnnnnnnnnnnnnnnnnnnnnnnnnnnnnnnnnnnnnnnnnnnnnnnnnnnnnnnnnnnnnnnnnnnnnnnnnnnnnnnnnnnnnnnnnnnnnnnnnnnnnnnnnnnnnnnnnnnnnnnnnnnnnnnnnnnnnnnnnnnnnnnnnnnnnnnnnnnnnnnnnnnnnnnnnnnnnnnnnnnnnnnnnnnnnnnnnnnnnnnnnnnnnnnnnnnnnnnnnnnnnnnnnnnnnnnnnnnnnnnnnnnnnnnnnnnnnnnnnnnnnnnnnnnnnnnnnnnnnnnnnnnnnnnnnnnnnnnnnnnnnnnnnnnnnnnnnnnnnnnnnnnnnnnnnnnnnnnnnnnnnnnnnnnnnnnnnnnnnnnnnnnnnnnnnnnnnnnnnnnnnnnnnnnnnnnnnnnnnnnnnnnnnnnnnnnnnnnnnnnnnnnnnnnnnnnnnnnnnnnnnnnnnnnnnnnnnnnnnnnnnnnnnnnnnnnnnnnnnnnnnnnnnnnnnnnnnnnnnnnnnnnnnnnnnnnnnnnnnnnnnnnnnnnnnnnnnnnnnnnnnnnnnnnnnnnnnnnnnnnnnnnnnnnnnnnnnnnnnnnnnnnnnnnnnnnnnnnnnnnnnnnnnnnnnnnnnnnnnnnnnnnnnnnnnnnnnnnnnnnnnnnnnnnnnnnnnnnnnnnnnnnnnnnnnnnnnnnnnnnnnnnnnnnnnnnnnnnnnnnnnnnnnnnnnnnnnnnnnnnnnnnnnnnnnnnnnnnnnnnnnnnnnnnnnnnnnnnnnnnnnnnnnnnnnnnnnnnnnnnnnnnnnnnnnnnnnnnnnnnnnnnnnnnnnnnnnnnnnnnnnnnnnnnnnnnnnnnnnnnnnnnnnnnnnnnnnnnnnnnnnnnnnnnnnnnnnnnnnnnnnnnnnnnnnnnnnnnnnnnnnnnnnnnnnnnnnnnnnnnnnnnnnnnnnnnnnnnnnnnnnnnnnnnnnnnnnnnnnnnnnnnnnnnnnnnnnnnnnnnnnnnnnnnnnnnnnnnnnnnnnnnnnnnnnnnnnnnnnnnnnnnnnnnnnnnnnnnnnnnnnnnnnnnnnnnnnnnnnnnnnnnnnnnnnnnnnnnnnnnnnnnnnnnnnnnnnnnnnnnnnnnnnnnnnnnnnnnnnnnnnnnnnnnnnnnnnnnnnnnnnnnnnnnnnnnnnnnnnnnnnnnnnnnnnnnnnnnnnnnnnnnnnnnnnnnnnnnnnnnnnnnnnnnnnnnnnnnnnnnnnnnnnnnnnnnnnnnnnnnnnnnnnnnnnnnnnnnnnnnnnnnnnnnnnnnnnnnnnnnnnnnnnnnnnnnnnnnnnnnnnnnnnnnnnnnnnnnnnnnnnnnnnnnnnnnnnnnnnnnnnnnnnnnnnnnnnnnnnnnnnnnnnnnnnnnnnnnnnnnnnnnnnnnnnnnnnnnnnnnnnnnnnnnnnnnnnnnnnnnnnnnnnnnnnnnnnnnnnnnnnnnnnnnnnnnnnnnnnnnnnnnnnnnnnnnnnnnnnnnnnnnnnnnnnnnnnnnnnnnnnnnnnnnnnnnnnnnnnnnnnnnnnnnnnnnnnnnnnnnnnnnnnnnnnnnnnnnnnnnnnnnnnnnnnnnnnnnnnnnnnnnnnnnnnnnnnnnnnnnnnnnnnnnnnnnnnnnnnnnnnnnnnnnnnnnnnnnnnnnnnnnnnnnnnnnnnnnnnnnnnnnnnnnnnnnnnnnnnnnnnnnnnnnnnnnnnnnnnnnnnnnnnnnnnnnnnnnnnnnnnnnnnnnnnnnnnnnnnnnnnnnnnnnnnnnnnnnnnnnnnnnnnnnnnnnnnnnnnnnnnnnnnnnnnnnnnnnnnnnnnnnnnnnnnnnnnnnnnnnnnnnnnnnnnnnnnnnnnnnnnnnnnnnnnnnnnnnnnnnnnnnnnnnnnnnnnnnnnnnnnnnnnnnnnnnnnnnnnnnnnnnnnnnnnnnnnnnnnnnnnnnnnnnnnnnnnnnnnnnnnnnnnnnnnnnnnnnnnnnnnnnnnnnnnnnnnnnnnnnnnnnnnnnnnnnnnnnnnnnnnnnnnnnnnnnnnnnnnnnnnnnnnnnnnnnnnnnnnnnnnnnnnnnnnnnnnnnnnnnnnnnnnnnnnnnnnnnnnnnnnnnnnnnnnnnnnnnnnnnnnnnnnnnnnnnnnnnnnnnnnnnnnnnnnnnnnnnnnnnnnnnnnnnnnnnnnnnnnnnnnnnnnnnnnnnnnnnnnnnnnnnnnnnnnnnnnnnnnnnnnnnnnnnnnnnnnnnnnnnnnnnnnnnnnnnnnnnnnnnnnnnnnnnnnnnnnnnnnnnnnnnnnnnnnnnnnnnnnnnnnnnnnnnnnnnnnnnnnnnnnnnnnnnnnnnnnnnnnnnnnnnnnnnnnnnnnnnnnnnnnnnnnnnnnnnnnnnnnnnnnnnnnnnnnnnnnnnnnnnnnnnnnnnnnnnnnnnnnnnnnnnnnnnnnnnnnnnnnnnnnnnnnnnnnnnnnnnnnnnnnnnnnnnnnnnnnnnnnnnnnnnnnnnnnnnnnnnnnnnnnnnnnnnnnnnnnnnnnnnnnnnnnnnnnnnnnnnnnnnnnnnnnnnnnnnnnnnnnnnnnnnnnnnnnnnnnnnnnnnnnnnnnnnnnnnnnnnnnnnnnnnnnnnnnnnnnnnnnnnnnnnnnnnnnnnnnnnnnnnnnnnnnnnnnnnnnnnnnnnnnnnnnnnnnnnnnnnnnnnnnnnnnnnnnnnnnnnnnnnnnnnnnnnnnnnnnnnnnnnnnnnnnnnnnnnnnnnnnnnnnnnnnnnnnnnnnnnnnnnnnnnnnnnnnnnnnnnnnnnnnnnnnnnnnnnnnnnnnnnnnnnnnnnnnnnnnnnnnnnnnnnnnnnnnnnnnnnnnnnnnnnnnnnnnnnnnnnnnnnnnnnnnnnnnnnnnnnnnnnnnnnnnnnnnnnnnnnnnnnnnnnnnnnnnnnnnnnnnnnnnnnnnnnnnnnnnnnnnnnnnnnnnnnnnnnnnnnnnnnnnnnnnnnnnnnnnnnnnnnnnnnnnnnnnnnnnnnnnnnnnnnnnnnnnnnnnnnnnnnnnnnnnnnnnnnnnnnnnnnnnnnnnnnnnnnnnnnnnnnnnnnnnnnnnnnnnnnnnnnnnnnnnnnnnnnnnnnnnnnnnnnnnnnnnnnnnnnnnnnnnnnnnnnnnnnnnnnnnnnnnnnnnnnnnnnnnnnnnnnnnnnnnnnnnnnnnnnnnnnnnnnnnnnnnnnnnnnnnnnnnnnnnnnnnnnnnnnnnnnnnnnnnnnnnnnnnnnnnnnnnnnnnnnnnnnnnnnnnnnnnnnnnnnnnnnnnnnnnnnnnnnnnnnnnnnnnnnnnnnnnnnnnnnnnnnnnnnnnnnnnnnnnnnnnnnnnnnnnnnnnnnnnnnnnnnnnnnnnnnnnnnnnnnnnnnnnnnnnnnnnnnnnnnnnnnnnnnnnnnnnnnnnnnnnnnnnnnnnnnnnnnnnnnnnnnnnnnnnnnnnnnnnnnnnnnnnnnnnnnnnnnnnnnnnnnnnnnnnnnnnnnnnnnnnnnnnnnnnnnnnnnnnnnnnnnnnnnnnnnnnnnnnnnnnnnnnnnnnnnnnnnnnnnnnnnnnnnnnnnnnnnnnnnnnnnnnnnnnnnnnnnnnnnnnnnnnnnnnnnnnnnnnnnnnnnnnnnnnnnnnnnnnnnnnnnnnnnnnnnnnnnnnnnnnnnnnnnnnnnnnnnnnnnnnnnnnnnnnnnnnnnnnnnnnnnnnnnnnnnnnnnnnnnnnnnnnnnnnnnnnnnnnnnnnnnnnnnnnnnnnnnnnnnnnnnnnnnnnnnnnnnnnnnnnnnnnnnnnnnnnnnnnnnnnnnnnnnnnnnnnnnnnnnnnnnnnnnnnnnnnnnnnnnnnnnnnnnnnnnnnnnnnnnnnnnnnnnnnnnnnnnnnnnnnnnnnnnnnnnnnnnnnnnnnnnnnnnnnnnnnnnnnnnnnnnnnnnnnnnnnnnnnnnnnnnnnnnnnnnnnnnnnnnnnnnnnnnnnnnnnnnnnnnnnnnnnnnnnnnnnnnnnnnnnnnnnnnnnnnnnnnnnnnnnnnnnnnnnnnnnnnnnnnnnnnnnnnnnnnnnnnnnnnnnnnnnnnnnnnnnnnnnnnnnnnnnnnnnnnnnnnnnnnnnnnnnnnnnnnnnnnnnnnnnnnnnnnnnnnnnnnnnnnnnnnnnnnnnnnnnnnnnnnnnnnnnnnnnnnnnnnnnnnnnnnnnnnnnnnnnnnnnnnnnnnnnnnnnnnnnnnnnnnnnnnnnnnnnnnnnnnnnnnnnnnnnnnnnnnnnnnnnnnnnnnnnnnnnnnnnnnnnnnnnnnnnnnnnnnnnnnnnnnnnnnnnnnnnnnnnnnnnnnnnnnnnnnnnnnnnnnnnnnnnnnnnnnnnnnnnnnnnnnnnnnnnnnnnnnnnnnnnnnnnnnnnnnnnnnnnnnnnnnnnnnnnnnnnnnnnnnnnnnnnnnnnnnnnnnnnnnnnnnnnnnnnnnnnnnnnnnnnnnnnnnnnnnnnnnnnnnnnnnnnnnnnnnnnnnnnnnnnnnnnnnnnnnnnnnnnnnnnnnnnnnnnnnnnnnnnnnnnnnnnnnnnnnnnnnnnnnnnnnnnnnnnnnnnnnnnnnnnnnnnnnnnnnnnnnnnnnnnnnnnnnnnnnnnnnnnnnnnnnnnnnnnnnnnnnnnnnnnnnnnnnnnnnnnnnnnnnnnnnnnnnnnnnnnnnnnnnnnnnnnnnnnnnnnnnnnnnnnnnnnnnnnnnnnnnnnnnnnnnnnnnnnnnnnnnnnnnnnnnnnnnnnnnnnnnnnnnnnnnnnnnnnnnnnnnnnnnnnnnnnnnnnnnnnnnnnnnnnnnnnnnnnnnnnnnnnnnnnnnnnnnnnnnnnnnnnnnnnnnnnnnnnnnnnnnnnnnnnnnnnnnnnnnnnnnnnnnnnnnnnnnnnnnnnnnnnnnnnnnnnnnnnnnnnnnnnnnnnnnnnnnnnnnnnnnnnnnnnnnnnnnnnnnnnnnnnnnnnnnnnnnnnnnnnnnnnnnnnnnnnnnnnnnnnnnnnnnnnnnnnnnnnnnnnnnnnnnnnnnnnnnnnnnnnnnnnnnnnnnnnnnnnnnnnnnnnnnnnnnnnnnnnnnnnnnnnnnnnnnnnnnnnnnnnnnnnnnnnnnnnnnnnnnnnnnnnnnnnnnnnnnnnnnnnnnnnnnnnnnnnnnnnnnnnnnnnnnnnnnnnnnnnnnnnnnnnnnnnnnnnnnnnnnnnnnnnnnnnnnnnnnnnnnnnnnnnnnnnnnnnnnnnnnnnnnnnnnnnnnnnnnnnnnnnnnnnnnnnnnnnnnnnnnnnnnnnnnnnnnnnnnnnnnnnnnnnnnnnnnnnnnnnnnnnnnnnnnnnnnnnnnnnnnnnnnnnnnnnnnnnnnnnnnnnnnnnnnnnnnnnnnnnnnnnnnnnnnnnnnnnnnnnnnnnnnnnnnnnnnnnnnnnnnnnnnnnnnnnnnnnnnnnnnnnnnnnnnnnnnnnnnnnnnnnnnnnnnnnnnnnnnnnnnnnnnnnnnnnnnnnnnnnnnnnnnnnnnnnnnnnnnnnnnnnnnnnnnnnnnnnnnnnnnnnnnnnnnnnnnnnnnnnnnnnnnnnnnnnnnnnnnnnnnnnnnnnnnnnnnnnnnnnnnnnnnnnnnnnnnnnnnnnnnnnnnnnnnnnnnnnnnnnnnnnnnnnnnnnnnnnnnnnnnnnnnnnnnnnnnnnnnnnnnnnnnnnnnnnnnnnnnnnnnnnnnnnnnnnnnnnnnnnnnnnnnnnnnnnnnnnnnnnnnnnnnnnnnnnnnnnnnnnnnnnnnnnnnnnnnnnnnnnnnnnnnnnnnnnnnnnnnnnnnnnnnnnnnnnnnnnnnnnnnnnnnnnnnnnnnnnnnnnnnnnnnnnnnnnnnnnnnnnnnnnnnnnnnnnnnnnnnnnnnnnnnnnnnnnnnnnnnnnnnnnnnnnnnnnnnnnnnnnnnnnnnnnnnnnnnnnnnnnnnnnnnnnnnnnnnnnnnnnnnnnnnnnnnnnnnnnnnnnnnnnnnnnnnnnnnnnnnnnnnnnnnnnnnnnnnnnnnnnnnnnnnnnnnnnnnnnnnnnnnnnnnnnnnnnnnnnnnnnnnnnnnnnnnnnnnnnnnnnnnnnnnnnnnnnnnnnnnnnnnnnnnnnnnnnnnnnnnnnnnnnnnnnnnnnnnnnnnnnnnnnnnnnnnnnnnnnnnnnnnnnnnnnnnnnnnnnnnnnnnnnnnnnnnnnnnnnnnnnnnnnnnnnnnnnnnnnnnnnnnnnnnnnnnnnnnnnnnnnnnnnnnnnnnnnnnnnnnnnnnnnnnnnnnnnnnnnnnnnnnnnnnnnnnnnnnnnnnnnnnnnnnnnnnnnnnnnnnnnnnnnnnnnnnnnnnnnnnnnnnnnnnnnnnnnnnnnnnnnnnnnnnnnnnnnnnnnnnnnnnnnnnnnnnnnnnnnnnnnnnnnnnnnnnnnnnnnnnnnnnnnnnnnnnnnnnnnnnnnnnnnnnnnnnnnnnnnnnnnnnnnnnnnnnnnnnnnnnnnnnnnnnnnnnnnnnnnnnnnnnnnnnnnnnnnnnnnnnnnnnnnnnnnnnnnnnnnnnnnnnnnnnnnnnnnnnnnnnnnnnnnnnnnnnnnnnnnnnnnnnnnnnnnnnnnnnnnnnnnnnnnnnnnnnnnnnnnnnnnnnnnnnnnnnnnnnnnnnnnnnnnnnnnnnnnnnnnnnnnnnnnnnnnnnnnnnnnnnnnnnnnnnnnnnnnnnnnnnnnnnnnnnnnnnnnnnnnnnnnnnnnnnnnnnnnnnnnnnnnnnnnnnnnnnnnnnnnnnnnnnnnnnnnnnnnnnnnnnnnnnnnnnnnnnnnnnnnnnnnnnnnnnnnnnnnnnnnnnnnnnnnnnnnnnnnnnnnnnnnnnnnnnnnnnnnnnnnnnnnnnnnnnnnnnnnnnnnnnnnnnnnnnnnnnnnnnnnnnnnnnnnnnnnnnnnnnnnnnnnnnnnnnnnnnnnnnnnnnnnnnnnnnnnnnnnnnnnnnnnnnnnnnnnnnnnnnnnnnnnnnnnnnnnnnnnnnnnnnnnnnnnnnnnnnnnnnnnnnnnnnnnnnnnnnnnnnnnnnnnnnnnnnnnnnnnnnnnnnnnnnnnnnnnnnnnnnnnnnnnnnnnnnnnnnnnnnnnnnnnnnnnnnnnnnnnnnnnnnnnnnnnnnnnnnnnnnnnnnnnnnnnnnnnnnnnnnnnnnnnnnnnnnnnnnnnnnnnnnnnnnnnnnnnnnnnnnnnnnnnnnnnnnnnnnnnnnnnnnnnnnnnnnnnnnnnnnnnnnnnnnnnnnnnnnnnnnnnnnnnnnnnnnnnnnnnnnnnnnnnnnnnnnnnnnnnnnnnnnnnnnnnnnnnnnnnnnnnnnnnnnnnnnnnnnnnnnnnnnnnnnnnnnnnnnnnnnnnnnnnnnnnnnnnnnnnnnnnnnnnnnnnnnnnnnnnnnnnnnnnnnnnnnnnnnnnnnnnnnnnnnnnnnnnnnnnnnnnnnnnnnnnnnnnnnnnnnnnnnnnnnnnnnnnnnnnnnnnnnnnnnnnnnnnnnnnnnnnnnnnnnnnnnnnnnnnnnnnnnnnnnnnnnnnnnnnnnnnnnnnnnnnnnnnnnnnnnnnnnnnnnnnnnnnnnnnnnnnnnnnnnnnnnnnnnnnnnnnnnnnnnnnnnnnnnnnnnnnnnnnnnnnnnnnnnnnnnnnnnnnnnnnnnnnnnnnnnnnnnnnnnnnnnnnnnnnnnnnnnnnnnnnnnnnnnnnnnnnnnnnnnnnnnnnnnnnnnnnnnnnnnnnnnnnnnnnnnnnnnnnnnnnnnnnnnnnnnnnnnnnnnnnnnnnnnnnnnnnnnnnnnnnnnnnnnnnnnnnnnnnnnnnnnnnnnnnnnnnnnnnnnnnnnnnnnnnnnnnnnnnnnnnnnnnnnnnnnnnnnnnnnnnnnnnnnnnnnnnnnnnnnnnnnnnnnnnnnnnnnnnnnnnnnnnnnnnnnnnnnnnnnnnnnnnnnnnnnnnnnnnnnnnnnnnnnnnnnnnnnnnnnnnnnnnnnnnnnnnnnnnnnnnnnnnnnnnnnnnnnnnnnnnnnnnnnnnnnnnnnnnnnnnnnnnnnnnnnnnnnnnnnnnnnnnnnnnnnnnnnnnnnnnnnnnnnnnnnnnnnnnnnnnnnnnnnnnnnnnnnnnnnnnnnnnnnnnnnnnnnnnnnnnnnnnnnnnnnnnnnnnnnnnnnnnnnnnnnnnnnnnnnnnnnnnnnnnnnnnnnnnnnnnnnnnnnnnnnnnnnnnnnnnnnnnnnnnnnnnnnnnnnnnnnnnnnnnnnnnnnnnnnnnnnnnnnnnnnnnnnnnnnnnnnnnnnnnnnnnnnnnnnnnnnnnnnnnnnnnnnnnnnnnnnnnnnnnnnnnnnnnnnnnnnnnnnnnnnnnnnnnnnnnnnnnnnnnnnnnnnnnnnnnnnnnnnnnnnnnnnnnnnnnnnnnnnnnnnnnnnnnnnnnnnnnnnnnnnnnnnnnnnnnnnnnnnnnnnnnnnnnnnnnnnnnnnnnnnnnnnnnnnnnnnnnnnnnnnnnnnnnnnnnnnnnnnnnnnnnnnnnnnnnnnnnnnnnnnnnnnnnnnnnnnnnnnnnnnnnnnnnnnnnnnnnnnnnnnnnnnnnnnnnnnnnnnnnnnnnnnnnnnnnnnnnnnnnnnnnnnnnnnnnnnnnnnnnnnnnnnnnnnnnnnnnnnnnnnnnnnnnnnnnnnnnnnnnnnnnnnnnnnnnnnnnnnnnnnnnnnnnnnnnnnnnnnnnnnnnnnnnnnnnnnnnnnnnnnnnnnnnnnnnnnnnnnnnnnnnnnnnnnnnnnnnnnnnnnnnnnnnnnnnnnnnnnnnnnnnnnnnnnnnnnnnnnnnnnnnnnnnnnnnnnnnnnnnnnnnnnnnnnnnnnnnnnnnnnnnnnnnnnnnnnnnnnnnnnnnnnnnnnnnnnnnnnnnnnnnnnnnnnnnnnnnnnnnnnnnnnnnnnnnnnnnnnnnnnnnnnnnnnnnnnnnnnnnnnnnnnnnnnnnnnnnnnnnnnnnnnnnnnnnnnnnnnnnnnnnnnnnnnnnnnnnnnnnnnnnnnnnnnnnnnnnnnnnnnnnnnnnnnnnnnnnnnnnnnnnnnnnnnnnnnnnnnnnnnnnnnnnnnnnnnnnnnnnnnnnnnnnnnnnnnnnnnnnnnnnnnnnnnnnnnnnnnnnnnnnnnnnnnnnnnnnnnnnnnnnnnnnnnnnnnnnnnnnnnnnnnnnnnnnnnnnnnnnnnnnnnnnnnnnnnnnnnnnnnnnnnnnnnnnnnnnnnnnnnnnnnnnnnnnnnnnnnnnnnnnnnnnnnnnnnnnnnnnnnnnnnnnnnnnnnnnnnnnnnnnnnnnnnnnnnnnnnnnnnnnnnnnnnnnnnnnnnnnnnnnnnnnnnnnnnnnnnnnnnnnnnnnnnnnnnnnnnnnnnnnnnnnnnnnnnnnnnnnnnnnnnnnnnnnnnnnnnnnnnnnnnnnnnnnnnnnnnnnnnnnnnnnnnnnnnnnnnnnnnnnnnnnnnnnnnnnnnnnnnnnnnnnnnnnnnnnnnnnnnnnnnnnnnnnnnnnnnnnnnnnnnnnnnnnnnnnnnnnnnnnnnnnnnnnnnnnnnnnnnnnnnnnnnnnnnnnnnnnnnnnnnnnnnnnnnnnnnnnnnnnnnnnnnnnnnnnnnnnnnnnnnnnnnnnnnnnnnnnnnnnnnnnnnnnnnnnnnnnnnnnnnnnnnnnnnnnnnnnnnnnnnnnnnnnnnnnnnnnnnnnnnnnnnnnnnnnnnnnnnnnnnnnnnnnnnnnnnnnnnnnnnnnnnnnnnnnnnnnnnnnnnnnnnnnnnnnnnnnnnnnnnnnnnnnnnnnnnnnnnnnnnnnnnnnnnnnnnnnnnnnnnnnnnnnnnnnnnnnnnnnnnnnnnnnnnnnnnnnnnnnnnnnnnnnnnnnnnnnnnnnnnnnnnnnnnnnnnnnnnnnnnnnnnnnnnnnnnnnnnnnnnnnnnnnnnnnnnnnnnnnnnnnnnnnnnnnnnnnnnnnnnnnnnnnnnnnnnnnnnnnnnnnnnnnnnnnnnnnnnnnnnnnnnnnnnnnnnnnnnnnnnnnnnnnnnnnnnnnnnnnnnnnnnnnnnnnnnnnnnnnnnnnnnnnnnnnnnnnnnnnnnnnnnnnnnnnnnnnnnnnnnnnnnnnnnnnnnnnnnnnnnnnnnnnnnnnnnnnnnnnnnnnnnnnnnnnnnnnnnnnnnnnnnnnnnnnnnnnnnnnnnnnnnnnnnnnnnnnnnnnnnnnnnnnnnnnnnnnnnnnnnnnnnnnnnnnnnnnnnnnnnnnnnnnnnnnnnnnnnnnnnnnnnnnnnnnnnnnnnnnnnnnnnnnnnnnnnnnnnnnnnnnnnnnnnnnnnnnnnnnnnnnnnnnnnnnnnnnnnnnnnnnnnnnnnnnnnnnnnnnnnnnnnnnnnnnnnnnnnnnnnnnnnnnnnnnnnnnnnnnnnnnnnnnnnnnnnnnnnnnnnnnnnnnnnnnnnnnnnnnnnnnnnnnnnnnnnnnnnnnnnnnnnnnnnnnnnnnnnnnnnnnnnnnnnnnnnnnnnnnnnnnnnnnnnnnnnnnnnnnnnnnnnnnnnnnnnnnnnnnnnnnnnnnnnnnnnnnnnnnnnnnnnnnnnnnnnnnnnnnnnnnnnnnnnnnnnnnnnnnnnnnnnnnnnnnnnnnnnnnnnnnnnnnnnnnnnnnnnnnnnnnnnnnnnnnnnnnnnnnnnnnnnnnnnnnnnnnnnnnnnnnnnnnnnnnnnnnnnnnnnnnnnnnnnnnnnnnnnnnnnnnnnnnnnnnnnnnnnnnnnnnnnnnnnnnnnnnnnnnnnnnnnnnnnnnnnnnnnnnnnnnnnnnnnnnnnnnnnnnnnnnnnnnnnnnnnnnnnnnnnnnnnnnnnnnnnnnnnnnnnnnnnnnnnnnnnnnnnnnnnnnnnnnnnnnnnnnnnnnnnnnnnnnnnnnnnnnnnnnnnnnnnnnnnnnnnnnnnnnnnnnnnnnnnnnnnnnnnnnnnnnnnnnnnnnnnnnnnnnnnnnnnnnnnnnnnnnnnnnnnnnnnnnnnnnnnnnnnnnnnnnnnnnnnnnnnnnnnnnnnnnnnnnnnnnnnnnnnnnnnnnnnnnnnnnnnnnnnnnnnnnnnnnnnnnnnnnnnnnnnnnnnnnnnnnnnnnnnnnnnnnnnnnnnnnnnnnnnnnnnnnnnnnnnnnnnnnnnnnnnnnnnnnnnnnnnnnnnnnnnnnnnnnnnnnnnnnnnnnnnnnnnnnnnnnnnnnnnnnnnnnnnnnnnnnnnnnnnnnnnnnnnnnnnnnnnnnnnnnnnnnnnnnnnnnnnnnnnnnnnnnnnnnnnnnnnnnnnnnnnnnnnnnnnnnnnnnnnnnnnnnnnnnnnnnnnnnnnnnnnnnnnnnnnnnnnnnnnnnnnnnnnnnnnnnnnnnnnnnnnnnnnnnnnnnnnnnnnnnnnnnnnnnnnnnnnnnnnnnnnnnnnnnnnnnnnnnnnnnnnnnnnnnnnnnnnnnnnnnnnnnnnnnnnnnnnnnnnnnnnnnnnnnnnnnnnnnnnnnnnnnnnnnnnnnnnnnnnnnnnnnnnnnnnnnnnnnnnnnnnnnnnnnnnnnnnnnnnnnnnnnnnnnnnnnnnnnnnnnnnnnnnnnnnnnnnnnnnnnnnnnnnnnnnnnnnnnnnnnnnnnnnnnnnnnnnnnnnnnnnnnnnnnnnnnnnnnnnnnnnnnnnnnnnnnnnnnnnnnnnnnnnnnnnnnnnnnnnnnnnnnnnnnnnnnnnnnnnnnnnnnnnnnnnnnnnnnnnnnnnnnnnnnnnnnnnnnnnnnnnnnnnnnnnnnnnnnnnnnnnnnnnnnnnnnnnnnnnnnnnnnnnnnnnnnnnnnnnnnnnnnnnnnnnnnnnnnnnnnnnnnnnnnnnnnnnnnnnnnnnnnnnnnnnnnnnnnnnnnnnnnnnnnnnnnnnnnnnnnnnnnnnnnnnnnnnnnnnnnnnnnnnnnnnnnnnnnnnnnnnnnnnnnnnnnnnnnnnnnnnnnnnnnnnnnnnnnnnnnnnnnnnnnnnnnnnnnnnnnnnnnnnnnnnnnnnnnnnnnnnnnnnnnnnnnnnnnnnnnnnnnnnnnnnnnnnnnnnnnnnnnnnnnnnnnnnnnnnnnnnnnnnnnnnnnnnnnnnnnnnnnnnnnnnnnnnnnnnnnnnnnnnnnnnnnnnnnnnnnnnnnnnnnnnnnnnnnnnnnnnnnnnnnnnnnnnnnnnnnnnnnnnnnnnnnnnnnnnnnnnnnnnnnnnnnnnnnnnnnnnnnnnnnnnnnnnnnnnnnnnnnnnnnnnnnnnnnnnnnnnnnnnnnnnnnnnnnnnnnnnnnnnnnnnnnnnnnnnnnnnnnnnnnnnnnnnnnnnnnnnnnnnnnnnnnnnnnnnnnnnnnnnnnnnnnnnnnnnnnnnnnnnnnnnnnnnnnnnnnnnnnnnnnnnnnnnnnnnnnnnnnnnnnnnnnnnnnnnnnnnnnnnnnnnnnnnnnnnnnnnnnnnnnnnnnnnnnnnnnnnnnnnnnnnnnnnnnnnnnnnnnnnnnnnnnnnnnnnnnnnnnnnnnnnnnnnnnnnnnnnnnnnnnnnnnnnnnnnnnnnnnnnnnnnnnnnnnnnnnnnnnnnnnnnnnnnnnnnnnnnnnnnnnnnnnnnnnnnnnnnnnnnnnnnnnnnnnnnnnnnnnnnnnnnnnnnnnnnnnnnnnnnnnnnnnnnnnnnnnnnnnnnnnnnnnnnnnnnnnnnnnnnnnnnnnnnnnnnnnnnnnnnnnnnnnnnnnnnnnnnnnnnnnnnnnnnnnnnnnnnnnnnnnnnnnnnnnnnnnnnnnnnnnnnnnnnnnnnnnnnnnnnnnnnnnnnnnnnnnnnnnnnnnnnnnnnnnnnnnnnnnnnnnnnnnnnnnnnnnnnnnnnnnnnnnnnnnnnnnnnnnnnnnnnnnnnnnnnnnnnnnnnnnnnnnnnnnnnnnnnnnnnnnnnnnnnnnnnnnnnnnnnnnnnnnnnnnnnnnnnnnnnnnnnnnnnnnnnnnnnnnnnnnnnnnnnnnnnnnnnnnnnnnnnnnnnnnnnnnnnnnnnnnnnnnnnnnnnnnnnnnnnnnnnnnnnnnnnnnnnnnnnnnnnnnnnnnnnnnnnnnnnnnnnnnnnnnnnnnnnnnnnnnnnnnnnnnnnnnnnnnnnnnnnnnnnnnnnnnnnnnnnnnnnnnnnnnnnnnnnnnnnnnnnnnnnnnnnnnnnnnnnnnnnnnnnnnnnnnnnnnnnnnnnnnnnnnnnnnnnnnnnnnnnnnnnnnnnnnnnnnnnnnnnnnnnnnnnnnnnnnnnnnnnnnnnnnnnnnnnnnnnnnnnnnnnnnnnnnnnnnnnnnnnnnnnnnnnnnnnnnnnnnnnnnnnnnnnnnnnnnnnnnnnnnnnnnnnnnnnnnnnnnnnnnnnnnnnnnnnnnnnnnnnnnnnnnnnnnnnnnnnnnnnnnnnnnnnnnnnnnnnnnnnnnnnnnnnnnnnnnnnnnnnnnnnnnnnnnnnnnnnnnnnnnnnnnnnnnnnnnnnnnnnnnnnnnnnnnnnnnnnnnnnnnnnnnnnnnnnnnnnnnnnnnnnnnnnnnnnnnnnnnnnnnnnnnnnnnnnnnnnnnnnnnnnnnnnnnnnnnnnnnnnnnnnnnnnnnnnnnnnnnnnnnnnnnnnnnnnnnnnnnnnnnnnnnnnnnnnnnnnnnnnnnnnnnnnnnnnnnnnnnnnnnnnnnnnnnnnnnnnnnnnnnnnnnnnnnnnnnnnnnnnnnnnnnnnnnnnnnnnnnnnnnnnnnnnnnnnnnnnnnnnnnnnnnnnnnnnnnnnnnnnnnnnnnnnnnnnnnnnnnnnnnnnnnnnnnnnnnnnnnnnnnnnnnnnnnnnnnnnnnnnnnnnnnnnnnnnnnnnnnnnnnnnnnnnnnnnnnnnnnnnnnnnnnnnnnnnnnnnnnnnnnnnnnnnnnnnnnnnnnnnnnnnnnnnnnnnnnnnnnnnnnnnnnnnnnnnnnnnnnnnnnnnnnnnnnnnnnnnnnnnnnnnnnnnnnnnnnnnnnnnnnnnnnnnnnnnnnnnnnnnnnnnnnnnnnnnnnnnnnnnnnnnnnnnnnnnnnnnnnnnnnnnnnnnnnnnnnnnnnnnnnnnnnnnnnnnnnnnnnnnnnnnnnnnnnnnnnnnnnnnnnnnnnnnnnnnnnnnnnnnnnnnnnnnnnnnnnnnnnnnnnnnnnnnnnnnnnnnnnnnnnnnnnnnnnnnnnnnnnnnnnnnnnnnnnnnnnnnnnnnnnnnnnnnnnnnnnnnnnnnnnnnnnnnnnnnnnnnnnnnnnnnnnnnnnnnnnnnnnnnnnnnnnnnnnnnnnnnnnnnnnnnnnnnnnnnnnnnnnnnnnnnnnnnnnnnnnnnnnnnnnnnnnnnnnnnnnnnnnnnnnnnnnnnnnnnnnnnnnnnnnnnnnnnnnnnnnnnnnnnnnnnnnnnnnnnnnnnnnnnnnnnnnnnnnnnnnnnnnnnnnnnnnnnnnnnnnnnnnnnnnnnnnnnnnnnnnnnnnnnnnnnnnnnnnnnnnnnnnnnnnnnnnnnnnnnnnnnnnnnnnnnnnnnnnnnnnnnnnnnnnnnnnnnnnnnnnnnnnnnnnnnnnnnnnnnnnnnnnnnnnnnnnnnnnnnnnnnnnnnnnnnnnnnnnnnnnnnnnnnnnnnnnnnnnnnnnnnnnnnnnnnnnnnnnnnnnnnnnnnnnnnnnnnnnnnnnnnnnnnnnnnnnnnnnnnnnnnnnnnnnnnnnnnnnnnnnnnnnnnnnnnnnnnnnnnnnnnnnnnnnnnnnnnnnnnnnnnnnnnnnnnnnnnnnnnnnnnnnnnnnnnnnnnnnnnnnnnnnnnnnnnnnnnnnnnnnnnnnnnnnnnnnnnnnnnnnnnnnnnnnnnnnnnnnnnnnnnnnnnnnnnnnnnnnnnnnnnnnnnnnnnnnnnnnnnnnnnnnnnnnnnnnnnnnnnnnnnnnnnnnnnnnnnnnnnnnnnnnnnnnnnnnnnnnnnnnnnnnnnnnnnnnnnnnnnnnnnnnnnnnnnnnnnnnnnnnnnnnnnnnnnnnnnnnnnnnnnnnnnnnnnnnnnnnnnnnnnnnnnnnnnnnnnnnnnnnnnnnnnnnnnnnnnnnnnnnnnnnnnnnnnnnnnnnnnnnnnnnnnnnnnnnnnnnnnnnnnnnnnnnnnnnnnnnnnnnnnnnnnnnnnnnnnnnnnnnnnnnnnnnnnnnnnnnnnnnnnnnnnnnnnnnnnnnnnnnnnnnnnnnnnnnnnnnnnnnnnnnnnnnnnnnnnnnnnnnnnnnnnnnnnnnnnnnnnnnnnnnnnnnnnnnnnnnnnnnnnnnnnnnnnnnnnnnnnnnnnnnnnnnnnnnnnnnnnnnnnnnnnnnnnnnnnnnnnnnnnnnnnnnnnnnnnnnnnnnnnnnnnnnnnnnnnnnnnnnnnnnnnnnnnnnnnnnnnnnnnnnnnnnnnnnnnnnnnnnnnnnnnnnnnnnnnnnnnnnnnnnnnnnnnnnnnnnnnnnnnnnnnnnnnnnnnnnnnnnnnnnnnnnnnnnnnnnnnnnnnnnnnnnnnnnnnnnnnnnnnnnnnnnnnnnnnnnnnnnnnnnnnnnnnnnnnnnnnnnnnnnnnnnnnnnnnnnnnnnnnnnnnnnnnnnnnnnnnnnnnnnnnnnnnnnnnnnnnnnnnnnnnnnnnnnnnnnnnnnnnnnnnnnnnnnnnnnnnnnnnnnnnnnnnnnnnnnnnnnnnnnnnnnnnnnnnnnnnnnnnnnnnnnnnnnnnnnnnnnnnnnnnnnnnnnnnnnnnnnnnnnnnnnnnnnnnnnnnnnnnnnnnnnnnnnnnnnnnnnnnnnnnnnnnnnnnnnnnnnnnnnnnnnnnnnnnnnnnnnnnnnnnnnnnnnnnnnnnnnnnnnnnnnnnnnnnnnnnnnnnnnnnnnnnnnnnnnnnnnnnnnnnnnnnnnnnnnnnnnnnnnnnnnnnnnnnnnnnnnnnnnnnnnnnnnnnnnnnnnnnnnnnnnnnnnnnnnnnnnnnnnnnnnnnnnnnnnnnnnnnnnnnnnnnnnnnnnnnnnnnnnnnnnnnnnnnnnnnnnnnnnnnnnnnnnnnnnnnnnnnnnnnnnnnnnnnnnnnnnnnnnnnnnnnnnnnnnnnnnnnnnnnnnnnnnnnnnnnnnnnnnnnnnnnnnnnnnnnnnnnnnnnnnnnnnnnnnnnnnnnnnnnnnnnnnnnnnnnnnnnnnnnnnnnnnnnnnnnnnnnnnnnnnnnnnnnnnnnnnnnnnnnnnnnnnnnnnnnnnnnnnnnnnnnnnnnnnnnnnnnnnnnnnnnnnnnnnnnnnnnnnnnnnnnnnnnnnnnnnnnnnnnnnnnnnnnnnnnnnnnnnnnnnnnnnnnnnnnnnnnnnnnnnnnnnnnnnnnnnnnnnnnnnnnnnnnnnnnnnnnnnnnnnnnnnnnnnnnnnnnnnnnnnnnnnnnnnnnnnnnnnnnnnnnnnnnnnnnnnnnnnnnnnnnnnnnnnnnnnnnnnnnnnnnnnnnnnnnnnnnnnnnnnnnnnnnnnnnnnnnnnnnnnnnnnnnnnnnnnnnnnnnnnnnnnnnnnnnnnnnnnnnnnnnnnnnnnnnnnnnnnnnnnnnnnnnnnnnnnnnnnnnnnnnnnnnnnnnnnnnnnnnnnnnnnnnnnnnnnnnnnnnnnnnnnnnnnnnnnnnnnnnnnnnnnnnnnnnnnnnnnnnnnnnnnnnnnnnnnnnnnnnnnnnnnnnnnnnnnnnnnnnnnnnnnnnnnnnnnnnnnnnnnnnnnnnnnnnnnnnnnnnnnnnnnnnnnnnnnnnnnnnnnnnnnnnnnnnnnnnnnnnnnnnnnnnnnnnnnnnnnnnnnnnnnnnnnnnnnnnnnnnnnnnnnnnnnnnnnnnnnnnnnnnnnnnnnnnnnnnnnnnnnnnnnnnnnnnnnnnnnnnnnnnnnnnnnnnnnnnnnnnnnnnnnnnnnnnnnnnnnnnnnnnnnnnnnnnnnnnnnnnnnnnnnnnnnnnnnnnnnnnnnnnnnnnnnnnnnnnnnnnnnnnnnnnnnnnnnnnnnnnnnnnnnnnnnnnnnnnnnnnnnnnnnnnnnnnnnnnnnnnnnnnnnnnnnnnnnnnnnnnnnnnnnnnnnnnnnnnnnnnnnnnnnnnnnnnnnnnnnnnnnnnnnnnnnnnnnnnnnnnnnnnnnnnnnnnnnnnnnnnnnnnnnnnnnnnnnnnnnnnnnnnnnnnnnnnnnnnnnnnnnnnnnnnnnnnnnnnnnnnnnnnnnnnnnnnnnnnnnnnnnnnnnnnnnnnnnnnnnnnnnnnnnnnnnnnnnnnnnnnnnnnnnnnnnnnnnnnnnnnnnnnnnnnnnnnnnnnnnnnnnnnnnnnnnnnnnnnnnnnnnnnnnnnnnnnnnnnnnnnnnnnnnnnnnnnnnnnnnnnnnnnnnnnnnnnnnnnnnnnnnnnnnnnnnnnnnnnnnnnnnnnnnnnnnnnnnnnnnnnnnnnnnnnnnnnnnnnnnnnnnnnnnnnnnnnnnnnnnnnnnnnnnnnnnnnnnnnnnnnnnnnnnnnnnnnnnnnnnnnnnnnnnnnnnnnnnnnnnnnnnnnnnnnnnnnnnnnnnnnnnnnnnnnnnnnnnnnnnnnnnnnnnnnnnnnnnnnnnnnnnnnnnnnnnnnnnnnnnnnnnnnnnnnnnnnnnnnnnnnnnnnnnnnnnnnnnnnnnnnnnnnnnnnnnnnnnnnnnnnnnnnnnnnnnnnnnnnnnnnnnnnnnnnnnnnnnnnnnnnnnnnnnnnnnnnnnnnnnnnnnnnnnnnnnnnnnnnnnnnnnnnnnnnnnnnnnnnnnnnnnnnnnnnnnnnnnnnnnnnnnnnnnnnnnnnnnnnnnnnnnnnnnnnnnnnnnnnnnnnnnnnnnnnnnnnnnnnnnnnnnnnnnnnnnnnnnnnnnnnnnnnnnnnnnnnnnnnnnnnnnnnnnnnnnnnnnnnnnnnnnnnnnnnnnnnnnnnnnnnnnnnnnnnnnnnnnnnnnnnnnnnnnnnnnnnnnnnnnnnnnnnnnnnnnnnnnnnnnnnnnnnnnnnnnnnnnnnnnnnnnnnnnnnnnnnnnnnnnnnnnnnnnnnnnnnnnnnnnnnnnnnnnnnnnnnnnnnnnnnnnnnnnnnnnnnnnnnnnnnnnnnnnnnnnnnnnnnnnnnnnnnnnnnnnnnnnnnnnnnnnnnnnnnnnnnnnnnnnnnnnnnnnnnnnnnnnnnnnnnnnnnnnnnnnnnnnnnnnnnnnnnnnnnnnnnnnnnnnnnnnnnnnnnnnnnnnnnnnnnnnnnnnnnnnnnnnnnnnnnnnnnnnnnnnnnnnnnnnnnnnnnnnnnnnnnnnnnnnnnnnnnnnnnnnnnnnnnnnnnnnnnnnnnnnnnnnnnnnnnnnnnnnnnnnnnnnnnnnnnnnnnnnnnnnnnnnnnnnnnnnnnnnnnnnnnnnnnnnnnnnnnnnnnnnnnnnnnnnnnnnnnnnnnnnnnnnnnnnnnnnnnnnnnnnnnnnnnnnnnnnnnnnnnnnnnnnnnnnnnnnnnnnnnnnnnnnnnnnnnnnnnnnnnnnnnnnnnnnnnnnnnnnnnnnnnnnnnnnnnnnnnnnnnnnnnnnnnnnnnnnnnnnnnnnnnnnnnnnnnnnnnnnnnnnnnnnnnnnnnnnnnnnnnnnnnnnnnnnnnnnnnnnnnnnnnnnnnnnnnnnnnnnnnnnnnnnnnnnnnnnnnnnnnnnnnnnnnnnnnnnnnnnnnnnnnnnnnnnnnnnnnnnnnnnnnnnnnnnnnnnnnnnnnnnnnnnnnnnnnnnnnnnnnnnnnnnnnnnnnnnnnnnnnnnnnnnnnnnnnnnnnnnnnnnnnnnnnnnnnnnnnnnnnnnnnnnnnnnnnnnnnnnnnnnnnnnnnnnnnnnnnnnnnnnnnnnnnnnnnnnnnnnnnnnnnnnnnnnnnnnnnnnnnnnnnnnnnnnnnnnnnnnnnnnnnnnnnnnnnnnnnnnnnnnnnnnnnnnnnnnnnnnnnnnnnnnnnnnnnnnnnnnnnnnnnnnnnnnnnnnnnnnnnnnnnnnnnnnnnnnnnnnnnnnnnnnnnnnnnnnnnnnnnnnnnnnnnnnnnnnnnnnnnnnnnnnnnnnnnnnnnnnnnnnnnnnnnnnnnnnnnnnnnnnnnnnnnnnnnnnnnnnnnnnnnnnnnnnnnnnnnnnnnnnnnnnnnnnnnnnnnnnnnnnnnnnnnnnnnnnnnnnnnnnnnnnnnnnnnnnnnnnnnnnnnnnnnnnnnnnnnnnnnnnnnnnnnnnnnnnnnnnnnnnnnnnnnnnnnnnnnnnnnnnnnnnnnnnnnnnnnnnnnnnnnnnnnnnnnnnnnnnnnnnnnnnnnnnnnnnnnnnnnnnnnnnnnnnnnnnnnnnnnnnnnnnnnnnnnnnnnnnnnnnnnnnnnnnnnnnnnnnnnnnnnnnnnnnnnnnnnnnnnnnnnnnnnnnnnnnnnnnnnnnnnnnnnnnnnnnnnnnnnnnnnnnnnnnnnnnnnnnnnnnnnnnnnnnnnnnnnnnnnnnnnnnnnnnnnnnnnnnnnnnnnnnnnnnnnnnnnnnnnnnnnnnnnnnnnnnnnnnnnnnnnnnnnnnnnnnnnnnnnnnnnnnnnnnnnnnnnnnnnnnnnnnnnnnnnnnnnnnnnnnnnnnnnnnnnnnnnnnnnnnnnnnnnnnnnnnnnnnnnnnnnnnnnnnnnnnnnnnnnnnnnnnnnnnnnnnnnnnnnnnnnnnnnnnnnnnnnnnnnnnnnnnnnnnnnnnnnnnnnnnnnnnnnnnnnnnnnnnnnnnnnnnnnnnnnnnnnnnnnnnnnnnnnnnnnnnnnnnnnnnnnnnnnnnnnnnnnnnnnnnnnnnnnnnnnnnnnnnnnnnnnnnnnnnnnnnnnnnnnnnnnnnnnnnnnnnnnnnnnnnnnnnnnnnnnnnnnnnnnnnnnnnnnnnnnnnnnnnnnnnnnnnnnnnnnnnnnnnnnnnnnnnnnnnnnnnnnnnnnnnnnnnnnnnnnnnnnnnnnnnnnnnnnnnnnnnnnnnnnnnnnnnnnnnnnnnnnnnnnnnnnnnnnnnnnnnnnnnnnnnnnnnnnnnnnnnnnnnnnnnnnnnnnnnnnnnnnnnnnnnnnnnnnnnnnnnnnnnnnnnnnnnnnnnnnnnnnnnnnnnnnnnnnnnnnnnnnnnnnnnnnnnnnnnnnnnnnnnnnnnnnnnnnnnnnnnnnnnnnnnnnnnnnnnnnnnnnnnnnnnnnnnnnnnnnnnnnnnnnnnnnnnnnnnnnnnnnnnnnnnnnnnnnnnnnnnnnnnnnnnnnnnnnnnnnnnnnnnnnnnnnnnnnnnnnnnnnnnnnnnnnnnnnnnnnnnnnnnnnnnnnnnnnnnnnnnnnnnnnnnnnnnnnnnnnnnnnnnnnnnnnnnnnnnnnnnnnnnnnnnnnnnnnnnnnnnnnnnnnnnnnnnnnnnnnnnnnnnnnnnnnnnnnnnnnnnnnnnnnnnnnnnnnnnnnnnnnnnnnnnnnnnnnnnnnnnnnnnnnnnnnnnnnnnnnnnnnnnnnnnnnnnnnnnnnnnnnnnnnnnnnnnnnnnnnnnnnnnnnnnnnnnnnnnnnnnnnnnnnnnnnnnnnnnnnnnnnnnnnnnnnnnnnnnnnnnnnnnnnnnnnnnnnnnnnnnnnnnnnnnnnnnnnnnnnnnnnnnnnnnnnnnnnnnnnnnnnnnnnnnnnnnnnnnnnnnnnnnnnnnnnnnnnnnnnnnnnnnnnnnnnnnnnnnnnnnnnnnnnnnnnnnnnnnnnnnnnnnnnnnnnnnnnnnnnnnnnnnnnnnnnnnnnnnnnnnnnnnnnnnnnnnnnnnnnnnnnnnnnnnnnnnnnnnnnnnnnnnnnnnnnnnnnnnnnnnnnnnnnnnnnnnnnnnnnnnnnnnnnnnnnnnnnnnnnnnnnnnnnnnnnnnnnnnnnnnnnnnnnnnnnnnnnnnnnnnnnnnnnnnnnnnnnnnnnnnnnnnnnnnnnnnnnnnnnnnnnnnnnnnnnnnnnnnnnnnnnnnnnnnnnnnnnnnnnnnnnnnnnnnnnnnnnnnnnnnnnnnnnnnnnnnnnnnnnnnnnnnnnnnnnnnnnnnnnnnnnnnnnnnnnnnnnnnnnnnnnnnnnnnnnnnnnnnnnnnnnnnnnnnnnnnnnnnnnnnnnnnnnnnnnnnnnnnnnnnnnnnnnnnnnnnnnnnnnnnnnnnnnnnnnnnnnnnnnnnnnnnnnnnnnnnnnnnnnnnnnnnnnnnnnnnnnnnnnnnnnnnnnnnnnnnnnnnnnnnnnnnnnnnnnnnnnnnnnnnnnnnnnnnnnnnnnnnnnnnnnnnnnnnnnnnnnnnnnnnnnnnnnnnnnnnnnnnnnnnnnnnnnnnnnnnnnnnnnnnnnnnnnnnnnnnnnnnnnnnnnnnnnnnnnnnnnnnnnnnnnnnnnnnnnnnnnnnnnnnnnnnnnnnnnnnnnnnnnnnnnnnnnnnnnnnnnnnnnnnnnnnnnnnnnnnnnnnnnnnnnnnnnnnnnnnnnnnnnnnnnnnnnnnnnnnnnnnnnnnnnnnnnnnnnnnnnnnnnnnnnnnnnnnnnnnnnnnnnnnnnnnnnnnnnnnnnnnnnnnnnnnnnnnnnnnnnnnnnnnnnnnnnnnnnnnnnnnnnnnnnnnnnnnnnnnnnnnnnnnnnnnnnnnnnnnnnnnnnnnnnnnnnnnnnnnnnnnnnnnnnnnnnnnnnnnnnnnnnnnnnnnnnnnnnnnnnnnnnnnnnnnnnnnnnnnnnnnnnnnnnnnnnnnnnnnnnnnnnnnnnnnnnnnnnnnnnnnnnnnnnnnnnnnnnnnnnnnnnnnnnnnnnnnnnnnnnnnnnnnnnnnnnnnnnnnnnnnnnnnnnnnnnnnnnnnnnnnnnnnnnnnnnnnnnnnnnnnnnnnnnnnnnnnnnnnnnnnnnnnnnnnnnnnnnnnnnnnnnnnnnnnnnnnnnnnnnnnnnnnnnnnnnnnnnnnnnnnnnnnnnnnnnnnnnnnnnnnnnnnnnnnnnnnnnnnnnnnnnnnnnnnnnnnnnnnnnnnnnnnnnnnnnnnnnnnnnnnnnnnnnnnnnnnnnnnnnnnnnnnnnnnnnnnnnnnnnnnnnnnnnnnnnnnnnnnnnnnnnnnnnnnnnnnnnnnnnnnnnnnnnnnnnnnnnnnnnnnnnnnnnnnnnnnnnnnnnnnnnnnnnnnnnnnnnnnnnnnnnnnnnnnnnnnnnnnnnnnnnnnnnnnnnnnnnnnnnnnnnnnnnnnnnnnnnnnnnnnnnnnnnnnnnnnnnnnnnnnnnnnnnnnnnnnnnnnnnnnnnnnnnnnnnnnnnnnnnnnnnnnnnnnnnnnnnnnnnnnnnnnnnnnnnnnnnnnnnnnnnnnnnnnnnnnnnnnnnnnnnnnnnnnnnnnnnnnnnnnnnnnnnnnnnnnnnnnnnnnnnnnnnnnnnnnnnnnnnnnnnnnnnnnnnnnnnnnnnnnnnnnnnnnnnnnnnnnnnnnnnnnnnnnnnnnnnnnnnnnnnnnnnnnnnnnnnnnnnnnnnnnnnnnnnnnnnnnnnnnnnnnnnnnnnnnnnnnnnnnnnnnnnnnnnnnnnnnnnnnnnnnnnnnnnnnnnnnnnnnnnnnnnnnnnnnnnnnnnnnnnnnnnnnnnnnnnnnnnnnnnnnnnnnnnnnnnnnnnnnnnnnnnnnnnnnnnnnnnnnnnnnnnnnnnnnnnnnnnnnnnnnnnnnnnnnnnnnnnnnnnnnnnnnnnnnnnnnnnnnnnnnnnnnnnnnnnnnnnnnnnnnnnnnnnnnnnnnnnnnnnnnnnnnnnnnnnnnnnnnnnnnnnnnnnnnnnnnnnnnnnnnnnnnnnnnnnnnnnnnnnnnnnnnnnnnnnnnnnnnnnnnnnnnnnnnnnnnnnnnnnnnnnnnnnnnnnnnnnnnnnnnnnnnnnnnnnnnnnnnnnnnnnnnnnnnnnnnnnnnnnnnnnnnnnnnnnnnnnnnnnnnnnnnnnnnnnnnnnnnnnnnnnnnnnnnnnnnnnnnnnnnnnnnnnnnnnnnnnnnnnnnnnnnnnnnnnnnnnnnnnnnnnnnnnnnnnnnnnnnnnnnnnnnnnnnnnnnnnnnnnnnnnnnnnnnnnnnnnnnnnnnnnnnnnnnnnnnnnnnnnnnnnnnnnnnnnnnnnnnnnnnnnnnnnnnnnnnnnnnnnnnnnnnnnnnnnnnnnnnnnnnnnnnnnnnnnnnnnnnnnnnnnnnnnnnnnnnnnnnnnnnnnnnnnnnnnnnnnnnnnnnnnnnnnnnnnnnnnnnnnnnnnnnnnnnnnnnnnnnnnnnnnnnnnnnnnnnnnnnnnnnnnnnnnnnnnnnnnnnnnnnnnnnnnnnnnnnnnnnnnnnnnnnnnnnnnnnnnnnnnnnnnnnnnnnnnnnnnnnnnnnnnnnnnnnnnnnnnnnnnnnnnnnnnnnnnnnnnnnnnnnnnnnnnnnnnnnnnnnnnnnnnnnnnnnnnnnnnnnnnnnnnnnnnnnnnnnnnnnnnnnnnnnnnnnnnnnnnnnnnnnnnnnnnnnnnnnnnnnnnnnnnnnnnnnnnnnnnnnnnnnnnnnnnnnnnnnnnnnnnnnnnnnnnnnnnnnnnnnnnnnnnnnnnnnnnnnnnnnnnnnnnnnnnnnnnnnnnnnnnnnnnnnnnnnnnnnnnnnnnnnnnnnnnnnnnnnnnnnnnnnnnnnnnnnnnnnnnnnnnnnnnnnnnnnnnnnnnnnnnnnnnnnnnnnnnnnnnnnnnnnnnnnnnnnnnnnnnnnnnnnnnnnnnnnnnnnnnnnnnnnnnnnnnnnnnnnnnnnnnnnnnnnnnnnnnnnnnnnnnnnnnnnnnnnnnnnnnnnnnnnnnnnnnnnnnnnnnnnnnnnnnnnnnnnnnnnnnnnnnnnnnnnnnnnnnnnnnnnnnnnnnnnnnnnnnnnnnnnnnnnnnnnnnnnnnnnnnnnnnnnnnnnnnnnnnnnnnnnnnnnnnnnnnnnnnnnnnnnnnnnnnnnnnnnnnnnnnnnnnnnnnnnnnnnnnnnnnnnnnnnnnnnnnnnnnnnnnnnnnnnnnnnnnnnnnnnnnnnnnnnnnnnnnnnnnnnnnnnnnnnnnnnnnnnnnnnnnnnnnnnnnnnnnnnnnnnnnnnnnnnnnnnnnnnnnnnnnnnnnnnnnnnnnnnnnnnnnnnnnnnnnnnnnnnnnnnnnnnnnnnnnnnnnnnnnnnnnnnnnnnnnnnnnnnnnnnnnnnnnnnnnnnnnnnnnnnnnnnnnnnnnnnnnnnnnnnnnnnnnnnnnnnnnnnnnnnnnnnnnnnnnnnnnnnnnnnnnnnnnnnnnnnnnnnnnnnnnnnnnnnnnnnnnnnnnnnnnnnnnnnnnnnnnnnnnnnnnnnnnnnnnnnnnnnnnnnnnnnnnnnnnnnnnnnnnnnnnnnnnnnnnnnnnnnnnnnnnnnnnnnnnnnnnnnnnnnnnnnnnnnnnnnnnnnnnnnnnnnnnnnnnnnnnnnnnnnnnnnnnnnnnnnnnnnnnnnnnnnnnnnnnnnnnnnnnnnnnnnnnnnnnnnnnnnnnnnnnnnnnnnnnnnnnnnnnnnnnnnnnnnnnnnnnnnnnnnnnnnnnnnnnnnnnnnnnnnnnnnnnnnnnnnnnnnnnnnnnnnnnnnnnnnnnnnnnnnnnnnnnnnnnnnnnnnnnnnnnnnnnnnnnnnnnnnnnnnnnnnnnnnnnnnnnnnnnnnnnnnnnnnnnnnnnnnnnnnnnnnnnnnnnnnnnnnnnnnnnnnnnnnnnnnnnnnnnnnnnnnnnnnnnnnnnnnnnnnnnnnnnnnnnnnnnnnnnnnnnnnnnnnnnnnnnnnnnnnnnnnnnnnnnnnnnnnnnnnnnnnnnnnnnnnnnnnnnnnnnnnnnnnnnnnnnnnnnnnnnnnnnnnnnnnnnnnnnnnnnnnnnnnnnnnnnnnnnnnnnnnnnnnnnnnnnnnnnnnnnnnnnnnnnnnnnnnnnnnnnnnnnnnnnnnnnnnnnnnnnnnnnnnnnnnnnnnnnnnnnnnnnnnnnnnnnnnnnnnnnnnnnnnnnnnnnnnnnnnnnnnnnnnnnnnnnnnnnnnnnnnnnnnnnnnnnnnnnnnnnnnnnnnnnnnnnnnnnnnnnnnnnnnnnnnnnnnnnnnnnnnnnnnnnnnnnnnnnnnnnnnnnnnnnnnnnnnnnnnnnnnnnnnnnnnnnnnnnnnnnnnnnnnnnnnnnnnnnnnnnnnnnnnnnnnnnnnnnnnnnnnnnnnnnnnnnnnnnnnnnnnnnnnnnnnnnnnnnnnnnnnnnnnnnnnnnnnnnnnnnnnnnnnnnnnnnnnnnnnnnnnnnnnnnnnnnnnnnnnnnnnnnnnnnnnnnnnnnnnnnnnnnnnnnnnnnnnnnnnnnnnnnnnnnnnnnnnnnnnnnnnnnnnnnnnnnnnnnnnnnnnnnnnnnnnnnnnnnnnnnnnnnnnnnnnnnnnnnnnnnnnnnnnnnnnnnnnnnnnnnnnnnnnnnnnnnnnnnnnnnnnnnnnnnnnnnnnnnnnnnnnnnnnnnnnnnnnnnnnnnnnnnnnnnnnnnnnnnnnnnnnnnnnnnnnnnnnnnnnnnnnnnnnnnnnnnnnnnnnnnnnnnnnnnnnnnnnnnnnnnnnnnnnnnnnnnnnnnnnnnnnnnnnnnnnnnnnnnnnnnnnnnnnnnnnnnnnnnnnnnnnnnnnnnnnnnnnnnnnnnnnnnnnnnnnnnnnnnnnnnnnnnnnnnnnnnnnnnnnnnnnnnnnnnnnnnnnnnnnnnnnnnnnnnnnnnnnnnnnnnnnnnnnnnnnnnnnnnnnnnnnnnnnnnnnnnnnnnnnnnnnnnnnnnnnnnnnnnnnnnnnnnnnnnnnnnnnnnnnnnnnnnnnnnnnnnnnnnnnnnnnnnnnnnnnnnnnnnnnnnnnnnnnnnnnnnnnnnnnnnnnnnnnnnnnnnnnnnnnnnnnnnnnnnnnnnnnnnnnnnnnnnnnnnnnnnnnnnnnnnnnnnnnnnnnnnnnnnnnnnnnnnnnnnnnnnnnnnnnnnnnnnnnnnnnnnnnnnnnnnnnnnnnnnnnnnnnnnnnnnnnnnnnnnnnnnnnnnnnnnnnnnnnnnnnnnnnnnnnnnnnnnnnnnnnnnnnnnnnnnnnnnnnnnnnnnnnnnnnnnnnnnnnnnnnnnnnnnnnnnnnnnnnnnnnnnnnnnnnnnnnnnnnnnnnnnnnnnnnnnnnnnnnnnnnnnnnnnnnnnnnnnnnnnnnnnnnnnnnnnnnnnnnnnnnnnnnnnnnnnnnnnnnnnnnnnnnnnnnnnnnnnnnnnnnnnnnnnnnnnnnnnnnnnnnnnnnnnnnnnnnnnnnnnnnnnnnnnnnnnnnnnnnnnnnnnnnnnnnnnnnnnnnnnnnnnnnnnnnnnnnnnnnnnnnnnnnnnnnnnnnnnnnnnnnnnnnnnnnnnnnnnnnnnnnnnnnnnnnnnnnnnnnnnnnnnnnnnnnnnnnnnnnnnnnnnnnnnnnnnnnnnnnnnnnnnnnnnnnnnnnnnnnnnnnnnnnnnnnnnnnnnnnnnnnnnnnnnnnnnnnnnnnnnnnnnnnnnnnnnnnnnnnnnnnnnnnnnnnnnnnnnnnnnnnnnnnnnnnnnnnnnnnnnnnnnnnnnnnnnnnnnnnnnnnnnnnnnnnnnnnnnnnnnnnnnnnnnnnnnnnnnnnnnnnnnnnnnnnnnnnnnnnnnnnnnnnnnnnnnnnnnnnnnnnnnnnnnnnnnnnnnnnnnnnnnnnnnnnnnnnnnnnnnnnnnnnnnnnnnnnnnnnnnnnnnnnnnnnnnnnnnnnnnnnnnnnnnnnnnnnnnnnnnnnnnnnnnnnnnnnnnnnnnnnnnnnnnnnnnnnnnnnnnnnnnnnnnnnnnnnnnnnnnnnnnnnnnnnnnnnnnnnnnnnnnnnnnnnnnnnnnnnnnnnnnnnnnnnnnnnnnnnnnnnnnnnnnnnnnnnnnnnnnnnnnnnnnnnnnnnnnnnnnnnnnnnnnnnnnnnnnnnnnnnnnnnnnnnnnnnnnnnnnnnnnnnnnnnnnnnnnnnnnnnnnnnnnnnnnnnnnnnnnnnnnnnnnnnnnnnnnnnnnnnnnnnnnnnnnnnnnnnnnnnnnnnnnnnnnnnnnnnnnnnnnnnnnnnnnnnnnnnnnnnnnnnnnnnnnnnnnnnnnnnnnnnnnnnnnnnnnnnnnnnnnnnnnnnnnnnnnnnnnnnnnnnnnnnnnnnnnnnnnnnnnnnnnnnnnnnnnnnnnnnnnnnnnnnnnnnnnnnnnnnnnnnnnnnnnnnnnnnnnnnnnnnnnnnnnnnnnnnnnnnnnnnnnnnnnnnnnnnnnnnnnnnnnnnnnnnnnnnnnnnnnnnnnnnnnnnnnnnnnnnnnnnnnnnnnnnnnnnnnnnnnnnnnnnnnnnnnnnnnnnnnnnnnnnnnnnnnnnnnnnnnnnnnnnnnnnnnnnnnnnnnnnnnnnnnnnnnnnnnnnnnnnnnnnnnnnnnnnnnnnnnnnnnnnnnnnnnnnnnnnnnnnnnnnnnnnnnnnnnnnnnnnnnnnnnnnnnnnnnnnnnnnnnnnnnnnnnnnnnnnnnnnnnnnnnnnnnnnnnnnnnnnnnnnnnnnnnnnnnnnnnnnnnnnnnnnnnnnnnnnnnnnnnnnnnnnnnnnnnnnnnnnnnnnnnnnnnnnnnnnnnnnnnnnnnnnnnnnnnnnnnnnnnnnnnnnnnnnnnnnnnnnnnnnnnnnnnnnnnnnnnnnnnnnnnnnnnnnnnnnnnnnnnnnnnnnnnnnnnnnnnnnnnnnnnnnnnnnnnnnnnnnnnnnnnnnnnnnnnnnnnnnnnnnnnnnnnnnnnnnnnnnnnnnnnnnnnnnnnnnnnnnnnnnnnnnnnnnnnnnnnnnnnnnnnnnnnnnnnnnnnnnnnnnnnnnnnnnnnnnnnnnnnnnnnnnnnnnnnnnnnnnnnnnnnnnnnnnnnnnnnnnnnnnnnnnnnnnnnnnnnnnnnnnnnnnnnnnnnnnnnnnnnnnnnnnnnnnnnnnnnnnnnnnnnnnnnnnnnnnnnnnnnnnnnnnnnnnnnnnnnnnnnnnnnnnnnnnnnnnnnnnnnnnnnnnnnnnnnnnnnnnnnnnnnnnnnnnnnnnnnnnnnnnnnnnnnnnnnnnnnnnnnnnnnnnnnnnnnnnnnnnnnnnnnnnnnnnnnnnnnnnnnnnnnnnnnnnnnnnnnnnnnnnnnnnnnnnnnnnnnnnnnnnnnnnnnnnnnnnnnnnnnnnnnnnnnnnnnnnnnnnnnnnnnnnnnnnnnnnnnnnnnnnnnnnnnnnnnnnnnnnnnnnnnnnnnnnnnnnnnnnnnnnnnnnnnnnnnnnnnnnnnnnnnnnnnnnnnnnnnnnnnnnnnnnnnnnnnnnnnnnnnnnnnnnnnnnnnnnnnnnnnnnnnnnnnnnnnnnnnnnnnnnnnnnnnnnnnnnnnnnnnnnnnnnnnnnnnnnnnnnnnnnnnnnnnnnnnnnnnnnnnnnnnnnnnnnnnnnnnnnnnnnnnnnnnnnnnnnnnnnnnnnnnnnnnnnnnnnnnnnnnnnnnnnnnnnnnnnnnnnnnnnnnnnnnnnnnnnnnnnnnnnnnnnnnnnnnnnnnnnnnnnnnnnnnnnnnnnnnnnnnnnnnnnnnnnnnnnnnnnnnnnnnnnnnnnnnnnnnnnnnnnnnnnnnnnnnnnnnnnnnnnnnnnnnnnnnnnnnnnnnnnnnnnnnnnnnnnnnnnnnnnnnnnnnnnnnnnnnnnnnnnnnnnnnnnnnnnnnnnnnnnnnnnnnnnnnnnnnnnnnnnnnnnnnnnnnnnnnnnnnnnnnnnnnnnnnnnnnnnnnnnnnnnnnnnnnnnnnnnnnnnnnnnnnnnnnnnnnnnnnnnnnnnnnnnnnnnnnnnnnnnnnnnnnnnnnnnnnnnnnnnnnnnnnnnnnnnnnnnnnnnnnnnnnnnnnnnnnnnnnnnnnnnnnnnnnnnnnnnnnnnnnnnnnnnnnnnnnnnnnnnnnnnnnnnnnnnnnnnnnnnnnnnnnnnnnnnnnnnnnnnnnnnnnnnnnnnnnnnnnnnnnnnnnnnnnnnnnnnnnnnnnnnnnnnnnnnnnnnnnnnnnnnnnnnnnnnnnnnnnnnnnnnnnnnnnnnnnnnnnnnnnnnnnnnnnnnnnnnnnnnnnnnnnnnnnnnnnnnnnnnnnnnnnnnnnnnnnnnnnnnnnnnnnnnnnnnnnnnnnnnnnnnnnnnnnnnnnnnnnnnnnnnnnnnnnnnnnnnnnnnnnnnnnnnnnnnnnnnnnnnnnnnnnnnnnnnnnnnnnnnnnnnnnnnnnnnnnnnnnnnnnnnnnnnnnnnnnnnnnnnnnnnnnnnnnnnnnnnnnnnnnnnnnnnnnnnnnnnnnnnnnnnnnnnnnnnnnnnnnnnnnnnnnnnnnnnnnnnnnnnnnnnnnnnnnnnnnnnnnnnnnnnnnnnnnnnnnnnnnnnnnnnnnnnnnnnnnnnnnnnnnnnnnnnnnnnnnnnnnnnnnnnnnnnnnnnnnnnnnnnnnnnnnnnnnnnnnnnnnnnnnnnnnnnnnnnnnnnnnnnnnnnnnnnnnnnnnnnnnnnnnnnnnnnnnnnnnnnnnnnnnnnnnnnnnnnnnnnnnnnnnnnnnnnnnnnnnnnnnnnnnnnnnnnnnnnnnnnnnnnnnnnnnnnnnnnnnnnnnnnnnnnnnnnnnnnnnnnnnnnnnnnnnnnnnnnnnnnnnnnnnnnnnnnnnnnnnnnnnnnnnnnnnnnnnnnnnnnnnnnnnnnnnnnnnnnnnnnnnnnnnnnnnnnnnnnnnnnnnnnnnnnnnnnnnnnnnnnnnnnnnnnnnnnnnnnnnnnnnnnnnnnnnnnnnnnnnnnnnnnnnnnnnnnnnnnnnnnnnnnnnnnnnnnnnnnnnnnnnnnnnnnnnnnnnnnnnnnnnnnnnnnnnnnnnnnnnnnnnnnnnnnnnnnnnnnnnnnnnnnnnnnnnnnnnnnnnnnnnnnnnnnnnnnnnnnnnnnnnnnnnnnnnnnnnnnnnnnnnnnnnnnnnnnnnnnnnnnnnnnnnnnnnnnnnnnnnnnnnnnnnnnnnnnnnnnnnnnnnnnnnnnnnnnnnnnnnnnnnnnnnnnnnnnnnnnnnnnnnnnnnnnnnnnnnnnnnnnnnnnnnnnnnnnnnnnnnnnnnnnnnnnnnnnnnnnnnnnnnnnnnnnnnnnnnnnnnnnnnnnnnnnnnnnnnnnnnnnnnnnnnnnnnnnnnnnnnnnnnnnnnnnnnnnnnnnnnnnnnnnnnnnnnnnnnnnnnnnnnnnnnnnnnnnnnnnnnnnnnnnnnnnnnnnnnnnnnnnnnnnnnnnnnnnnnnnnnnnnnnnnnnnnnnnnnnnnnnnnnnnnnnnnnnnnnnnnnnnnnnnnnnnnnnnnnnnnnnnnnnnnnnnnnnnnnnnnnnnnnnnnnnnnnnnnnnnnnnnnnnnnnnnnnnnnnnnnnnnnnnnnnnnnnnnnnnnnnnnnnnnnnnnnnnnnnnnnnnnnnnnnnnnnnnnnnnnnnnnnnnnnnnnnnnnnnnnnnnnnnnnnnnnnnnnnnnnnnnnnnnnnnnnnnnnnnnnnnnnnnnnnnnnnnnnnnnnnnnnnnnnnnnnnnnnnnnnnnnnnnnnnnnnnnnnnnnnnnnnnnnnnnnnnnnnnnnnnnnnnnnnnnnnnnnnnnnnnnnnnnnnnnnnnnnnnnnnnnnnnnnnnnnnnnnnnnnnnnnnnnnnnnnnnnnnnnnnnnnnnnnnnnnnnnnnnnnnnnnnnnnnnnnnnnnnnnnnnnnnnnnnnnnnnnnnnnnnnnnnnnnnnnnnnnnnnnnnnnnnnnnnnnnnnnnnnnnnnnnnnnnnnnnnnnnnnnnnnnnnnnnnnnnnnnnnnnnnnnnnnnnnnnnnnnnnnnnnnnnnnnnnnnnnnnnnnnnnnnnnnnnnnnnnnnnnnnnnnnnnnnnnnnnnnnnnnnnnnnnnnnnnnnnnnnnnnnnnnnnnnnnnnnnnnnnnnnnnnnnnnnnnnnnnnnnnnnnnnnnnnnnnnnnnnnnnnnnnnnnnnnnnnnnnnnnnnnnnnnnnnnnnnnnnnnnnnnnnnnnnnnnnnnnnnnnnnnnnnnnnnnnnnnnnnnnnnnnnnnnnnnnnnnnnnnnnnnnnnnnnnnnnnnnnnnnnnnnnnnnnnnnnnnnnnnnnnnnnnnnnnnnnnnnnnnnnnnnnnnnnnnnnnnnnnnnnnnnnnnnnnnnnnnnnnnnnnnnnnnnnnnnnnnnnnnnnnnnnnnnnnnnnnnnnnnnnnnnnnnnnnnnnnnnnnnnnnnnnnnnnnnnnnnnnnnnnnnnnnnnnnnnnnnnnnnnnnnnnnnnnnnnnnnnnnnnnnnnnnnnnnnnnnnnnnnnnnnnnnnnnnnnnnnnnnnnnnnnnnnnnnnnnnnnnnnnnnnnnnnnnnnnnnnnnnnnnnnnnnnnnnnnnnnnnnnnnnnnnnnnnnnnnnnnnnnnnnnnnnnnnnnnnnnnnnnnnnnnnnnnnnnnnnnnnnnnnnnnnnnnnnnnnnnnnnnnnnnnnnnnnnnnnnnnnnnnnnnnnnnnnnnnnnnnnnnnnnnnnnnnnnnnnnnnnnnnnnnnnnnnnnnnnnnnnnnnnnnnnnnnnnnnnnnnnnnnnnnnnnnnnnnnnnnnnnnnnnnnnnnnnnnnnnnnnnnnnnnnnnnnnnnnnnnnnnnnnnnnnnnnnnnnnnnnnnnnnnnnnnnnnnnnnnnnnnnnnnnnnnnnnnnnnnnnnnnnnnnnnnnnnnnnnnnnnnnnnnnnnnnnnnnnnnnnnnnnnnnnnnnnnnnnnnnnnnnnnnnnnnnnnnnnnnnnnnnnnnnnnnnnnnnnnnnnnnnnnnnnnnnnnnnnnnnnnnnnnnnnnnnnnnnnnnnnnnnnnnnnnnnnnnnnnnnnnnnnnnnnnnnnnnnnnnnnnnnnnnnnnnnnnnnnnnnnnnnnnnnnnnnnnnnnnnnnnnnnnnnnnnnnnnnnnnnnnnnnnnnnnnnnnnnnnnnnnnnnnnnnnnnnnnnnnnnnnnnnnnnnnnnnnnnnnnnnnnnnnnnnnnnnnnnnnnnnnnnnnnnnnnnnnnnnnnnnnnnnnnnnnnnnnnnnnnnnnnnnnnnnnnnnnnnnnnnnnnnnnnnnnnnnnnnnnnnnnnnnnnnnnnnnnnnnnnnnnnnnnnnnnnnnnnnnnnnnnnnnnnnnnnnnnnnnnnnnnnnnnnnnnnnnnnnnnnnnnnnnnnnnnnnnnnnnnnnnnnnnnnnnnnnnnnnnnnnnnnnnnnnnnnnnnnnnnnnnnnnnnnnnnnnnnnnnnnnnnnnnnnnnnnnnnnnnnnnnnnnnnnnnnnnnnnnnnnnnnnnnnnnnnnnnnnnnnnnnnnnnnnnnnnnnnnnnnnnnnnnnnnnnnnnnnnnnnnnnnnnnnnnnnnnnnnnnnnnnnnnnnnnnnnnnnnnnnnnnnnnnnnnnnnnnnnnnnnnnnnnnnnnnnnnnnnnnnnnnnnnnnnnnnnnnnnnnnnnnnnnnnnnnnnnnnnnnnnnnnnnnnnnnnnnnnnnnnnnnnnnnnnnnnnnnnnnnnnnnnnnnnnnnnnnnnnnnnnnnnnnnnnnnnnnnnnnnnnnnnnnnnnnnnnnnnnnnnnnnnnnnnnnnnnnnnnnnnnnnnnnnnnnnnnnnnnnnnnnnnnnnnnnnnnnnnnnnnnnnnnnnnnnnnnnnnnnnnnnnnnnnnnnnnnnnnnnnnnnnnnnnnnnnnnnnnnnnnnnnnnnnnnnnnnnnnnnnnnnnnnnnnnnnnnnnnnnnnnnnnnnnnnnnnnnnnnnnnnnnnnnnnnnnnnnnnnnnnnnnnnnnnnnnnnnnnnnnnnnnnnnnnnnnnnnnnnnnnnnnnnnnnnnnnnnnnnnnnnnnnnnnnnnnnnnnnnnnnnnnnnnnnnnnnnnnnnnnnnnnnnnnnnnnnnnnnnnnnnnnnnnnnnnnnnnnnnnnnnnnnnnnnnnnnnnnnnnnnnnnnnnnnnnnnnnnnnnnnnnnnnnnnnnnnnnnnnnnnnnnnnnnnnnnnnnnnnnnnnnnnnnnnnnnnnnnnnnnnnnnnnnnnnnnnnnnnnnnnnnnnnnnnnnnnnnnnnnnnnnnnnnnnnnnnnnnnnnnnnnnnnnnnnnnnnnnnnnnnnnnnnnnnnnnnnnnnnnnnnnnnnnnnnnnnnnnnnnnnnnnnnnnnnnnnnnnnnnnnnnnnnnnnnnnnnnnnnnnnnnnnnnnnnnnnnnnnnnnnnnnnnnnnnnnnnnnnnnnnnnnnnnnnnnnnnnnnnnnnnnnnnnnnnnnnnnnnnnnnnnnnnnnnnnnnnnnnnnnnnnnnnnnnnnnnnnnnnnnnnnnnnnnnnnnnnnnnnnnnnnnnnnnnnnnnnnnnnnnnnnnnnnnnnnnnnnnnnnnnnnnnnnnnnnnnnnnnnnnnnnnnnnnnnnnnnnnnnnnnnnnnnnnnnnnnnnnnnnnnnnnnnnnnnnnnnnnnnnnnnnnnnnnnnnnnnnnnnnnnnnnnnnnnnnnnnnnnnnnnnnnnnnnnnnnnnnnnnnnnnnnnnnnnnnnnnnnnnnnnnnnnnnnnnnnnnnnnnnnnnnnnnnnnnnnnnnnnnnnnnnnnnnnnnnnnnnnnnnnnnnnnnnnnnnnnnnnnnnnnnnnnnnnnnnnnnnnnnnnnnnnnnnnnnnnnnnnnnnnnnnnnnnnnnnnnnnnnnnnnnnnnnnnnnnnnnnnnnnnnnnnnnnnnnnnnnnnnnnnnnnnnnnnnnnnnnnnnnnnnnnnnnnnnnnnnnnnnnnnnnnnnnnnnnnnnnnnnnnnnnnnnnnnnnnnnnnnnnnnnnnnnnnnnnnnnnnnnnnnnnnnnnnnnnnnnnnnnnnnnnnnnnnnnnnnnnnnnnnnnnnnnnnnnnnnnnnnnnnnnnnnnnnnnnnnnnnnnnnnnnnnnnnnnnnnnnnnnnnnnnnnnnnnnnnnnnnnnnnnnnnnnnnnnnnnnnnnnnnnnnnnnnnnnnnnnnnnnnnnnnnnnnnnnnnnnnnnnnnnnnnnnnnnnnnnnnnnnnnnnnnnnnnnnnnnnnnnnnnnnnnnnnnnnnnnnnnnnnnnnnnnnnnnnnnnnnnnnnnnnnnnnnnnnnnnnnnnnnnnnnnnnnnnnnnnnnnnnnnnnnnnnnnnnnnnnnnnnnnnnnnnnnnnnnnnnnnnnnnnnnnnnnnnnnnnnnnnnnnnnnnnnnnnnnnnnnnnnnnnnnnnnnnnnnnnnnnnnnnnnnnnnnnnnnnnnnnnnnnnnnnnnnnnnnnnnnnnnnnnnnnnnnnnnnnnnnnnnnnnnnnnnnnnnnnnnnnnnnnnnnnnnnnnnnnnnnnnnnnnnnnnnnnnnnnnnnnnnnnnnnnnnnnnnnnnnnnnnnnnnnnnnnnnnnnnnnnnnnnnnnnnnnnnnnnnnnnnnnnnnnnnnnnnnnnnnnnnnnnnnnnnnnnnnnnnnnnnnnnnnnnnnnnnnnnnnnnnnnnnnnnnnnnnnnnnnnnnnnnnnnnnnnnnnnnnnnnnnnnnnnnnnnnnnnnnnnnnnnnnnnnnnnnnnnnnnnnnnnnnnnnnnnnnnnnnnnnnnnnnnnnnnnnnnnnnnnnnnnnnnnnnnnnnnnnnnnnnnnnnnnnnnnnnnnnnnnnnnnnnnnnnnnnnnnnnnnnnnnnnnnnnnnnnnnnnnnnnnnnnnnnnnnnnnnnnnnnnnnnnnnnnnnnnnnnnnnnnnnnnnnnnnnnnnnnnnnnnnnnnnnnnnnnnnnnnnnnnnnnnnnnnnnnnnnnnnnnnnnnnnnnnnnnnnnnnnnnnnnnnnnnnnnnnnnnnnnnnnnnnnnnnnnnnnnnnnnnnnnnnnnnnnnnnnnnnnnnnnnnnnnnnnnnnnnnnnnnnnnnnnnnnnnnnnnnnnnnnnnnnnnnnnnnnnnnnnnnnnnnnnnnnnnnnnnnnnnnnnnnnnnnnnnnnnnnnnnnnnnnnnnnnnnnnnnnnnnnnnnnnnnnnnnnnnnnnnnnnnnnnnnnnnnnnnnnnnnnnnnnnnnnnnnnnnnnnnnnnnnnnnnnnnnnnnnnnnnnnnnnnnnnnnnnnnnnnnnnnnnnnnnnnnnnnnnnnnnnnnnnnnnnnnnnnnnnnnnnnnnnnnnnnnnnnnnnnnnnnnnnnnnnnnnnnnnnnnnnnnnnnnnnnnnnnnnnnnnnnnnnnnnnnnnnnnnnnnnnnnnnnnnnnnnnnnnnnnnnnnnnnnnnnnnnnnnnnnnnnnnnnnnnnnnnnnnnnnnnnnnnnnnnnnnnnnnnnnnnnnnnnnnnnnnnnnnnnnnnnnnnnnnnnnnnnnnnnnnnnnnnnnnnnnnnnnnnnnnnnnnnnnnnnnnnnnnnnnnnnnnnnnnnnnnnnnnnnnnnnnnnnnnnnnnnnnnnnnnnnnnnnnnnnnnnnnnnnnnnnnnnnnnnnnnnnnnnnnnnnnnnnnnnnnnnnnnnnnnnnnnnnnnnnnnnnnnnnnnnnnnnnnnnnnnnnnnnnnnnnnnnnnnnnnnnnnnnnnnnnnnnnnnnnnnnnnnnnnnnnnnnnnnnnnnnnnnnnnnnnnnnnnnnnnnnnnnnnnnnnnnnnnnnnnnnnnnnnnnnnnnnnnnnnnnnnnnnnnnnnnnnnnnnnnnnnnnnnnnnnnnnnnnnnnnnnnnnnnnnnnnnnnnnnnnnnnnnnnnnnnnnnnnnnnnnnnnnnnnnnnnnnnnnnnnnnnnnnnnnnnnnnnnnnnnnnnnnnnnnnnnnnnnnnnnnnnnnnnnnnnnnnnnnnnnnnnnnnnnnnnnnnnnnnnnnnnnnnnnnnnnnnnnnnnnnnnnnnnnnnnnnnnnnnnnnnnnnnnnnnnnnnnnnnnnnnnnnnnnnnnnnnnnnnnnnnnnnnnnnnnnnnnnnnnnnnnnnnnnnnnnnnnnnnnnnnnnnnnnnnnnnnnnnnnnnnnnnnnnnnnnnnnnnnnnnnnnnnnnnnnnnnnnnnnnnnnnnnnnnnnnnnnnnnnnnnnnnnnnnnnnnnnnnnnnnnnnnnnnnnnnnnnnnnnnnnnnnnnnnnnnnnnnnnnnnnnnnnnnnnnnnnnnnnnnnnnnnnnnnnnnnnnnnnnnnnnnnnnnnnnnnnnnnnnnnnnnnnnnnnnnnnnnnnnnnnnnnnnnnnnnnnnnnnnnnnnnnnnnnnnnnnnnnnnnnnnnnnnnnnnnnnnnnnnnnnnnnnnnnnnnnnnnnnnnnnnnnnnnnnnnnnnnnnnnnnnnnnnnnnnnnnnnnnnnnnnnnnnnnnnnnnnnnnnnnnnnnnnnnnnnnnnnnnnnnnnnnnnnnnnnnnnnnnnnnnnnnnnnnnnnnnnnnnnnnnnnnnnnnnnnnnnnnnnnnnnnnnnnnnnnnnnnnnnnnnnnnnnnnnnnnnnnnnnnnnnnnnnnnnnnnnnnnnnnnnnnnnnnnnnnnnnnnnnnnnnnnnnnnnnnnnnnnnnnnnnnnnnnnnnnnnnnnnnnnnnnnnnnnnnnnnnnnnnnnnnnnnnnnnnnnnnnnnnnnnnnnnnnnnnnnnnnnnnnnnnnnnnnnnnnnnnnnnnnnnnnnnnnnnnnnnnnnnnnnnnnnnnnnnnnnnnnnnnnnnnnnnnnnnnnnnnnnnnnnnnnnnnnnnnnnnnnnnnnnnnnnnnnnnnnnnnnnnnnnnnnnnnnnnnnnnnnnnnnnnnnnnnnnnnnnnnnnnnnnnnnnnnnnnnnnnnnnnnnnnnnnnnnnnnnnnnnnnnnnnnnnnnnnnnnnnnnnnnnnnnnnnnnnnnnnnnnnnnnnnnnnnnnnnnnnnnnnnnnnnnnnnnnnnnnnnnnnnnnnnnnnnnnnnnnnnnnnnnnnnnnnnnnnnnnnnnnnnnnnnnnnnnnnnnnnnnnnnnnnnnnnnnnnnnnnnnnnnnnnnnnnnnnnnnnnnnnnnnnnnnnnnnnnnnnnnnnnnnnnnnnnnnnnnnnnnnnnnnnnnnnnnnnnnnnnnnnnnnnnnnnnnnnnnnnnnnnnnnnnnnnnnnnnnnnnnnnnnnnnnnnnnnnnnnnnnnnnnnnnnnnnnnnnnnnnnnnnnnnnnnnnnnnnnnnnnnnnnnnnnnnnnnnnnnnnnnnnnnnnnnnnnnnnnnnnnnnnnnnnnnnnnnnnnnnnnnnnnnnnnnnnnnnnnnnnnnnnnnnnnnnnnnnnnnnnnnnnnnnnnnnnnnnnnnnnnnnnnnnnnnnnnnnnnnnnnnnnnnnnnnnnnnnnnnnnnnnnnnnnnnnnnnnnnnnnnnnnnnnnnnnnnnnnnnnnnnnnnnnnnnnnnnnnnnnnnnnnnnnnnnnnnnnnnnnnnnnnnnnnnnnnnnnnnnnnnnnnnnnnnnnnnnnnnnnnnnnnnnnnnnnnnnnnnnnnnnnnnnnnnnnnnnnnnnnnnnnnnnnnnnnnnnnnnnnnnnnnnnnnnnnnnnnnnnnnnnnnnnnnnnnnnnnnnnnnnnnnnnnnnnnnnnnnnnnnnnnnnnnnnnnnnnnnnnnnnnnnnnnnnnnnnnnnnnnnnnnnnnnnnnnnnnnnnnnnnnnnnnnnnnnnnnnnnnnnnnnnnnnnnnnnnnnnnnnnnnnnnnnnnnnnnnnnnnnnnnnnnnnnnnnnnnnnnnnnnnnnnnnnnnnnnnnnnnnnnnnnnnnnnnnnnnnnnnnnnnnnnnnnnnnnnnnnnnnnnnnnnnnnnnnnnnnnnnnnnnnnnnnnnnnnnnnnnnnnnnnnnnnnnnnnnnnnnnnnnnnnnnnnnnnnnnnnnnnnnnnnnnnnnnnnnnnnnnnnnnnnnnnnnnnnnnnnnnnnnnnnnnnnnnnnnnnnnnnnnnnnnnnnnnnnnnnnnnnnnnnnnnnnnnnnnnnnnnnnnnnnnnnnnnnnnnnnnnnnnnnnnnnnnnnnnnnnnnnnnnnnnnnnnnnnnnnnnnnnnnnnnnnnnnnnnnnnnnnnnnnnnnnnnnnnnnnnnnnnnnnnnnnnnnnnnnnnnnnnnnnnnnnnnnnnnnnnnnnnnnnnnnnnnnnnnnnnnnnnnnnnnnnnnnnnnnnnnnnnnnnnnnnnnnnnnnnnnnnnnnnnnnnnnnnnnnnnnnnnnnnnnnnnnnnnnnnnnnnnnnnnnnnnnnnnnnnnnnnnnnnnnnnnnnnnnnnnnnnnnnnnnnnnnnnnnnnnnnnnnnnnnnnnnnnnnnnnnnnnnnnnnnnnnnnnnnnnnnnnnnnnnnnnnnnnnnnnnnnnnnnnnnnnnnnnnnnnnnnnnnnnnnnnnnnnnnnnnnnnnnnnnnnnnnnnnnnnnnnnnnnnnnnnnnnnnnnnnnnnnnnnnnnnnnnnnnnnnnnnnnnnnnnnnnnnnnnnnnnnnnnnnnnnnnnnnnnnnnnnnnnnnnnnnnnnnnnnnnnnnnnnnnnnnnnnnnnnnnnnnnnnnnnnnnnnnnnnnnnnnnnnnnnnnnnnnnnnnnnnnnnnnnnnnnnnnnnnnnnnnnnnnnnnnnnnnnnnnnnnnnnnnnnnnnnnnnnnnnnnnnnnnnnnnnnnnnnnnnnnnnnnnnnnnnnnnnnnnnnnnnnnnnnnnnnnnnnnnnnnnnnnnnnnnnnnnnnnnnnnnnnnnnnnnnnnnnnnnnnnnnnnnnnnnnnnnnnnnnnnnnnnnnnnnnnnnnnnnnnnnnnnnnnnnnnnnnnnnnnnnnnnnnnnnnnnnnnnnnnnnnnnnnnnnnnnnnnnnnnnnnnnnnnnnnnnnnnnnnnnnnnnnnnnnnnnnnnnnnnnnnnnnnnnnnnnnnnnnnnnnnnnnnnnnnnnnnnnnnnnnnnnnnnnnnnnnnnnnnnnnnnnnnnnnnnnnnnnnnnnnnnnnnnnnnnnnnnnnnnnnnnnnnnnnnnnnnnnnnnnnnnnnnnnnnnnnnnnnnnnnnnnnnnnnnnnnnnnnnnnnnnnnnnnnnnnnnnnnnnnnnnnnnnnnnnnnnnnnnnnnnnnnnnnnnnnnnnnnnnnnnnnnnnnnnnnnnnnnnnnnnnnnnnnnnnnnnnnnnnnnnnnnnnnnnnnnnnnnnnnnnnnnnnnnnnnnnnnnnnnnnnnnnnnnnnnnnnnnnnnnnnnnnnnnnnnnnnnnnnnnnnnnnnnnnnnnnnnnnnnnnnnnnnnnnnnnnnnnnnnnnnnnnnnnnnnnnnnnnnnnnnnnnnnnnnnnnnnnnnnnnnnnnnnnnnnnnnnnnnnnnnnnnnnnnnnnnnnnnnnnnnnnnnnnnnnnnnnnnnnnnnnnnnnnnnnnnnnnnnnnnnnnnnnnnnnnnnnnnnnnnnnnnnnnnnnnnnnnnnnnnnnnnnnnnnnnnnnnnnnnnnnnnnnnnnnnnnnnnnnnnnnnnnnnnnnnnnnnnnnnnnnnnnnnnnnnnnnnnnnnnnnnnnnnnnnnnnnnnnnnnnnnnnnnnnnnnnnnnnnnnnnnnnnnnnnnnnnnnnnnnnnnnnnnnnnnnnnnnnnnnnnnnnnnnnnnnnnnnnnnnnnnnnnnnnnnnnnnnnnnnnnnnnnnnnnnnnnnnnnnnnnnnnnnnnnnnnnnnnnnnnnnnnnnnnnnnnnnnnnnnnnnnnnnnnnnnnnnnnnnnnnnnnnnnnnnnnnnnnnnnnnnnnnnnnnnnnnnnnnnnnnnnnnnnnnnnnnnnnnnnnnnnnnnnnnnnnnnnnnnnnnnnnnnnnnnnnnnnnnnnnnnnnnnnnnnnnnnnnnnnnnnnnnnnnnnnnnnnnnnnnnnnnnnnnnnnnnnnnnnnnnnnnnnnnnnnnnnnnnnnnnnnnnnnnnnnnnnnnnnnnnnnnnnnnnnnnnnnnnnnnnnnnnnnnnnnnnnnnnnnnnnnnnnnnnnnnnnnnnnnnnnnnnnnnnnnnnnnnnnnnnnnnnnnnnnnnnnnnnnnnnnnnnnnnnnnnnnnnnnnnnnnnnnnnnnnnnnnnnnnnnnnnnnnnnnnnnnnnnnnnnnnnnnnnnnnnnnnnnnnnnnnnnnnnnnnnnnnnnnnnnnnnnnnnnnnnnnnnnnnnnnnnnnnnnnnnnnnnnnnnnnnnnnnnnnnnnnnnnnnnnnnnnnnnnnnnnnnnnnnnnnnnnnnnnnnnnnnnnnnnnnnnnnnnnnnnnnnnnnnnnnnnnnnnnnnnnnnnnnnnnnnnnnnnnnnnnnnnnnnnnnnnnnnnnnnnnnnnnnnnnnnnnnnnnnnnnnnnnnnnnnnnnnnnnnnnnnnnnnnnnnnnnnnnnnnnnnnnnnnnnnnnnnnnnnnnnnnnnnnnnnnnnnnnnnnnnnnnnnnnnnnnnnnnnnnnnnnnnnnnnnnnnnnnnnnnnnnnnnnnnnnnnnnnnnnnnnnnnnnnnnnnnnnnnnnnnnnnnnnnnnnnnnnnnnnnnnnnnnnnnnnnnnnnnnnnnnnnnnnnnnnnnnnnnnnnnnnnnnnnnnnnnnnnnnnnnnnnnnnnnnnnnnnnnnnnnnnnnnnnnnnnnnnnnnnnnnnnnnnnnnnnnnnnnnnnnnnnnnnnnnnnnnnnnnnnnnnnnnnnnnnnnnnnnnnnnnnnnnnnnnnnnnnnnnnnnnnnnnnnnnnnnnnnnnnnnnnnnnnnnnnnnnnnnnnnnnnnnnnnnnnnnnnnnnnnnnnnnnnnnnnnnnnnnnnnnnnnnnnnnnnnnnnnnnnnnnnnnnnnnnnnnnnnnnnnnnnnnnnnnnnnnnnnnnnnnnnnnnnnnnnnnnnnnnnnnnnnnnnnnnnnnnnnnnnnnnnnnnnnnnnnnnnnnnnnnnnnnnnnnnnnnnnnnnnnnnnnnnnnnnnnnnnnnnnnnnnnnnnnnnnnnnnnnnnnnnnnnnnnnnnnnnnnnnnnnnnnnnnnnnnnnnnnnnnnnnnnnnnnnnnnnnnnnnnnnnnnnnnnnnnnnnnnnnnnnnnnnnnnnnnnnnnnnnnnnnnnnnnnnnnnnnnnnnnnnnnnnnnnnnnnnnnnnnnnnnnnnnnnnnnnnnnnnnnnnnnnnnnnnnnnnnnnnnnnnnnnnnnnnnnnnnnnnnnnnnnnnnnnnnnnnnnnnnnnnnnnnnnnnnnnnnnnnnnnnnnnnnnnnnnnnnnnnnnnnnnnnnnnnnnnnnnnnnnnnnnnnnnnnnnnnnnnnnnnnnnnnnnnnnnnnnnnnnnnnnnnnnnnnnnnnnnnnnnnnnnnnnnnnnnnnnnnnnnnnnnnnnnnnnnnnnnnnnnnnnnnnnnnnnnnnnnnnnnnnnnnnnnnnnnnnnnnnnnnnnnnnnnnnnnnnnnnnnnnnnnnnnnnnnnnnnnnnnnnnnnnnnnnnnnnnnnnnnnnnnnnnnnnnnnnnnnnnnnnnnnnnnnnnnnnnnnnnnnnnnnnnnnnnnnnnnnnnnnnnnnnnnnnnnnnnnnnnnnnnnnnnnnnnnnnnnnnnnnnnnnnnnnnnnnnnnnnnnnnnnnnnnnnnnnnnnnnnnnnnnnnnnnnnnnnnnnnnnnnnnnnnnnnnnnnnnnnnnnnnnnnnnnnnnnnnnnnnnnnnnnnnnnnnnnnnnnnnnnnnnnnnnnnnnnnnnnnnnnnnnnnnnnnnnnnnnnnnnnnnnnnnnnnnnnnnnnnnnnnnnnnnnnnnnnnnnnnnnnnnnnnnnnnnnnnnnnnnnnnnnnnnnnnnnnnnnnnnnnnnnnnnnnnnnnnnnnnnnnnnnnnnnnnnnnnnnnnnnnnnnnnnnnnnnnnnnnnnnnnnnnnnnnnnnnnnnnnnnnnnnnnnnnnnnnnnnnnnnnnnnnnnnnnnnnnnnnnnnnnnnnnnnnnnnnnnnnnnnnnnnnnnnnnnnnnnnnnnnnnnnnnnnnnnnnnnnnnnnnnnnnnnnnnnnnnnnnnnnnnnnnnnnnnnnnnnnnnnnnnnnnnnnnnnnnnnnnnnnnnnnnnnnnnnnnnnnnnnnnnnnnnnnnnnnnnnnnnnnnnnnnnnnnnnnnnnnnnnnnnnnnnnnnnnnnnnnnnnnnnnnnnnnnnnnnnnnnnnnnnnnnnnnnnnnnnnnnnnnnnnnnnnnnnnnnnnnnnnnnnnnnnnnnnnnnnnnnnnnnnnnnnnnnnnnnnnnnnnnnnnnnnnnnnnnnnnnnnnnnnnnnnnnnnnnnnnnnnnnnnnnnnnnnnnnnnnnnnnnnnnnnnnnnnnnnnnnnnnnnnnnnnnnnnnnnnnnnnnnnnnnnnnnnnnnnnnnnnnnnnnnnnnnnnnnnnnnnnnnnnnnnnnnnnnnnnnnnnnnnnnnnnnnnnnnnnnnnnnnnnnnnnnnnnnnnnnnnnnnnnnnnnnnnnnnnnnnnnnnnnnnnnnnnnnnnnnnnnnnnnnnnnnnnnnnnnnnnnnnnnnnnnnnnnnnnnnnnnnnnnnnnnnnnnnnnnnnnnnnnnnnnnnnnnnnnnnnnnnnnnnnnnnnnnnnnnnnnnnnnnnnnnnnnnnnnnnnnnnnnnnnnnnnnnnnnnnnnnnnnnnnnnnnnnnnnnnnnnnnnnnnnnnnnnnnnnnnnnnnnnnnnnnnnnnnnnnnnnnnnnnnnnnnnnnnnnnnnnnnnnnnnnnnnnnnnnnnnnnnnnnnnnnnnnnnnnnnnnnnnnnnnnnnnnnnnnnnnnnnnnnnnnnnnnnnnnnnnnnnnnnnnnnnnnnnnnnnnnnnnnnnnnnnnnnnnnnnnnnnnnnnnnnnnnnnnnnnnnnnnnnnnnnnnnnnnnnnnnnnnnnnnnnnnnnnnnnnnnnnnnnnnnnnnnnnnnnnnnnnnnnnnnnnnnnnnnnnnnnnnnnnnnnnnnnnnnnnnnnnnnnnnnnnnnnnnnnnnnnnnnnnnnnnnnnnnnnnnnnnnnnnnnnnnnnnnnnnnnnnnnnnnnnnnnnnnnnnnnnnnnnnnnnnnnnnnnnnnnnnnnnnnnnnnnnnnnnnnnnnnnnnnnnnnnnnnnnnnnnnnnnnnnnnnnnnnnnnnnnnnnnnnnnnnnnnnnnnnnnnnnnnnnnnnnnnnnnnnnnnnnnnnnnnnnnnnnnnnnnnnnnnnnnnnnnnnnnnnnnnnnnnnnnnnnnnnnnnnnnnnnnnnnnnnnnnnnnnnnnnnnnnnnnnnnnnnnnnnnnnnnnnnnnnnnnnnnnnnnnnnnnnnnnnnnnnnnnnnnnnnnnnnnnnnnnnnnnnnnnnnnnnnnnnnnnnnnnnnnnnnnnnnnnnnnnnnnnnnnnnnnnnnnnnnnnnnnnnnnnnnnnnnnnnnnnnnnnnnnnnnnnnnnnnnnnnnnnnnnnnnnnnnnnnnnnnnnnnnnnnnnnnnnnnnnnnnnnnnnnnnnnnnnnnnnnnnnnnnnnnnnnnnnnnnnnnngtctctctcggcggcctggcgcctcgccaccgcgtccacgccatgatcggctgtgttttgggcctacggcggctgaccagacgtctgcaccctgccgacctgctcgacgtcggcagtgcgcctccgatggacaagcggggcggagaatgcgtatcgcttcatacgacacccatatcgcgacgactgacgacgttggttgccacaggcgaatgccgttgcacgtcgcgtaagcgaataggacgtggaagttcgacccgagtcacccagtcagggactcggccggcgcgtcgacgctgattttgcgattccgctttgtggtcgctgtgctgtcggcagcaacctgtgaggctaccagagcatgtgggatgggtctgggcgcatcgtggaagcatgggatgcagctgaagaggatgcggaaagtcggtgcggaaacggtgtccgcgcgagatgtgtggtcggtttgtagggcgttgtatgggccgagtaggatgcggataggcgtgtcgtgagtggcgtgtgcgtgtgctgtgcgtagagtgcgtggttgtgtgtggcgggttgtgtgcagcgttttgtttgattttgggtgggttgtcaaattaggaccgagtgtagctcagttggtagagcgattgactgtagtgttctatactgtgtctcagtatactcggaaatcaattggtcgctggttcgattccggccactcggattttatccatgtctcccgcgcactccttttttcgttctgcgctccgtacgccccgatccgcctgcccacgcttctctgtaggaacccgattcctaccgtcatctcaaccgctacatgctcttcttgaaccgataccccagcctcatgttttcaacgtgaaccgtctgcagatatgccggacgggatggctgtcttatcgcgaatggcaccacattcatgaagattgtcaaacattttttggggcaaatgcaaggatcgggtaaaggtctggccgtaaagcaggagggtacatggtccgtgtaactcccgccgtagcaagctggcgcaatgccatgccgttcaagttagcaaccaaaggtgctgcggagttcctgagtgcgtgcatccgacctcagaatattgatcaggccggggcgtcagtggagatatctcttcgcaaggtggtcgcttagctgcaggatgcttaggtgccgcgttccaggcgaacgatgttagggggagcatgtaagcgaaccacatcatacgaaaccttaatcgatctatgtgagaatcagcaatattagactagccaccagtgtatatcatcaagatggtcaagccaacagattcaccagttgaagcgcggttgaaaatcctcaattgttcggctgaaatggcacttcaggctgtcaacgcataggttgcgtattacaagcagttgaagcaggacgttaaagtattgatggagagattggggggccgagtgcaaagcttcctgtcacgaaaggcgtttgtagacgcggccctagctgatataccaccgccatttgctgaggacatccccgaccccattgagcgacacatcagcgttgaaggccatgagcaccaagaataagctgagtcaccactaatcgaattaagactttaattttttttgaaagcaaaactacaatgacatacgttgttccgtaaaacataaagtttcttcgccttcatcgagcagcctcaacggatccctcgacataattggagcctgtcgatttgcctttgtaggatcgaaatgcccttgtagttttcatccacagtgctcaaagcctttagctatgctaaacatttctaagcgctgaaacaaagggagaagatcacacccactcttgaacgtagtgccgctggaaccctttcttgacgtacccaaacaaatattctatcgggttgaaaaattgcagtagggagaaaaactggcacaataccaatacttcgtatatgtacgaaatcggggtgcctgtggacgcgctagactatagccgttttcacacttgggcattctcgaggttttgtttaccgatactctgtttaatttcaaataagtactgtaaataccaaagacgttctgtttctctataaagacctttccccgggaactgacggccccggataaatcactcgttctggtggaccgtgtatctactagacgattcgtcctccaagtgctcttgattctctaagaaccgcaacccgggaacggacgggctatcgagggagaaagctcaaggcgctatatcacactcgtcaagacgcaggtgcggaagaaggacttacagacccacaatgtacaagagcaactgaaggagaaggatcgagatggaggactagcagcaggccctccgaataatacattgaagtggaaatactacagcaatatttgtatggaattattttttttgcaacctcgaaaaatattaataacagacgtcgagtactgtcaaacattattttgtaccccctgctgtactataaatctcggtccctgccagtcgttagccttcgaactctgacagccaaccacaaactttgttggccagccgcagctttttgtcttagcactttgtaggcctccgcattccttaacttaccatggcccccacacccgcgttcaccaacaagcaagtctgcgacttcttcttcaagcccgtcctcgaccaccaggacgagccgaccagcttctttcgctgtcggtgctcgaaggttcgcaagcaagacatcaagactggttacacgaacctgatgagccacgtgcgctctcaacaccccaacttcaccgcagagatcgccaacagtggcatggccggtgggacgctgattggcttcgtcgacacgaaaaaccagacggtctacagctgggtcgactgggccgtctcctgtaacctccccttctcgttcccggaagacgagacggtggcaaagtacgcgtctgtttctccgatctccaccgagtccctcgtgaagtacatgggccttttgaccaaagcagctgaagaaattatcgctgctattctacttgagaagtttggaatcgtcttcgacgggagcacgtacgtggtcgtgttcgcggtattcgcccacgatggcaagattgagaagattctgcttgcaatgccccccctggttgacgacgaagtcatggatcactcagctcctgctcacgtcgacttcctccagaccattctgggcttcttcaagtgcaccttggccagcgtgctctatctcgttggcgataactgccctaccaacggtgccgttgctacgctaatgagggtgccgtttgtggggcgcgccagtcatcgacttagcttggcggtagtggagtacatggaggcttacgaacccctactcaacaaggtgcaagatttgatgcgtaaattacgcggtctgaatgcttcggcgagtcttcggtaagttcacttaaccatattgcgatatttatctcgaaattattttactaagttttaatttaacatgctcaggaaaaagaccggtgctgcgccagtcgacgcggtggtcgtcgacgttcaacatggtcaagcgctacttcgacctacaagatgcaatcaacacgctcgacgactcaacagccgctttaatgccgactcggcgcgaggaaaaccaacccaagagcctcctcgacgagttgaaggcatttgagtcatcgtccaaaaaactacagagctcagaagggctgtcgctgctggacgctcgcgacatcttcgatgctctcatcgctgagcaccctggtgttgaaagccacctgggaaccgacgatgctgtcgttcatcaacttgagttcgaggacgcctgcgtgggtgtgcttctcaacaagacggacttgctaacagcgcagcaacgagctctactggcacctttttccgtccccgcaacctcgtcccccgtggtggagaacaaaaaacttggtttcacggatcgagcgttaaaaagacgcagaatgctgcgtgagcagccgtgtgagtaccctgaaatcgcagtgataccccccccccacttctaacatccgcgagcgctttttcagtcaggcaaagcatgtcctgggaagccacaggcaaggattgcttcctgttcatctggagaccattctcttcctcaaggtgaaccggcagctgtggggtgtgaagacggtagcagacgtagtgaacgctacaaagtgagatgcaggacttagtggtacgatattgcgcgatcagcaggaataatgtatgtatccgtaccaagcacttccctacaataagttactttgctgattgacttaaatgtcattgcagtcgaattttcggaaggcctgactagcagcttagcctgcagattgaggagaagggccgcattttcagcgtactccaaagtcaaattctgtatcgcagagccctattatggacctcattaacccccccaaggaccacgccgacttatataacctttcgtttgcctaacatgttgcaatatacaccatgttaaggccatgataacacttctttttagtatggtctgtaataagtacggttatacgtcacatacctgcatactttatgccatcaaatatattatcctcaaagcctcttatctagacttttatcatccttcccactaatgtacatcccttaacatgttatacctacaacatattaaggtctgttcactttcacacgttgccctatacaaccttggtccttctggggttaacactctcgacgtggggacaaagcaccttaacggatccgtggacatgttcttcttcgtgaggaagcgcgtgaagggcattgggcgggacgagcggtgcgaattatttgctctgaaaaaaactgctcatagtgcaagcggaccgcaacgggggcatgaaaccgacgctcagcagtgtaggggaagtacccctcctttcggatgtggtgggagagctcttcatcggacgcgaagagtccttgcacgatatctcgcacgccacacggatactcaaggctggtgtctgcatgtttgccactcgccagatataatcaggggggtaagtcgagttgaggatactttttatttttatattgtctggccgatggcggctagcaacgtgtcgcgcattgcgtcgggcaaccgttgaagcggaggcgcaatctcggcaaattacactgtaaatcgcctttactactcggatcaccgcgcggttcggctccgtcgtatttctaagcgcgatccctttttcgggtgggtatcccagtggccgcgtcccggtgcttccgtgcaagccgcagtgttcgcgcactgacggacacgatgcggctagcaccgagtcatggttgaaggagcgtgtgggtaaaggcttgcaccgacgctgagaagagctagaaaaggcggaacgtcacgagatcattcgcaacaatcctgacgaggaccgcacagttctcctagcgttgtgctacacggcagagaggatctgacgagctacactaaccgcggatggggtgttcaaacgcctacgaaaatgagtgatgagcctgggcaagcgggcaataccaatatagagattggtcgcgtgctaattgtacctgaaggagattgcaacaagattacagaggagtaattgtccaagcatgttaccttgtgtaaagatatgatcagcgcagcatttattgcagagattacagctatggcagaagctacccgggaaggtgatttggagagggtgcgggctaacatgggagaaggttacaacagtgaacaggtatggggtcgatcaggttggcgatggtgctttatcggacccgtttctagaaaatggcgccattgctagaaacttcacgggagctctgtgcgaattaagcagaatagtagcaacatcattctttaaagcgaaccttttgcgactgagaagcttgtctacatcgcgaccctgaagctgatattaccgcttggctcattagccaaacatagtatttgttgatatgctgaatcgaaaggcagtaaacgtggtggcaatcgtgaccaagaaaattgtaaccggcacgggacttccagtgtacatcggtaaacggacatggttcgcttgcaacggtcgtatcaccccaccccaccccagtcctaccgccccggaaaatgcctaggtagtcctctgtaaagacggcgtcatctctaaatatcatttaataccttccatctagatcggggctatccggtcggcccagtaaagcaatggctgtatacaaaagccgacgcggatacgtgagcaagggaacagagcgctattgaagcatagagttcaagtagagggaacacggtattcggataagtgtgttgtcacgtcactgcttccaccatgttgatactggtcttcacctagctgaagctgcacatcaatactggcacggactaaagcaacaaaccgaaacattagtactcattatatgtgaggtttcttttccgcacaaaatcttacctaaatactgacgatggactagccagcagtgccacgcaatcaagtcagattgatcgtctttgtgctcttggctccgtatcgctggatgtcttgtccacgtcggtcacctgcgacatctggtcgctcttaaaatcgtccgcttttaacttacctcgagcaccttcaacacgttcgtgctgccctcatggtaggggacgaagaacttaccttcggtggtgcgagattgatcacctccactaaatgctccttcaacagcacaaccaccagtagcagcaagagcccttcaactacgaacacaacccagtaacggaagtccaccgaatcctacagtagtgaatcgcaataactgttgaagtgagacgtctaaaactttttaatattttttgacttcggcccttaagcgtatttctacagcggacgatcaaaccgcgtatgagacggtttcaaacaaaacaaaatgatgctcaggcgccatttcgagttttcgaaataatcgtgttttaagtggaccaatccattttcgcacataaccggacatcaaaagctagaaatgaatatcactcgtaaatagcattaatacactcttattcgattactttaagattgggctatccgactatatacaataggcggagttgagccatcgaaattgagcagaaacactaagcacacatgtgcagaactggcaagcagaaaaattacgcaaaagtaagcagaaatcgcgaaggggagagtgtcgaactttctctaatattatcgtacttagtagacagtttgccccccccctccgacgaagggcagcacagcgagggagcacttgtcatctcgggcgtgcgcattgtgacatctgagtggcagacgcagtgcccatttgcaccatcgtgagcgcgttcgatggtgtccgtacggttgccgccgacggcgatgttggcgcgagacgtgcagcggtactgtggcagcgcaagcacgccaaagtgtcgtcgcccattatctacttccgcgtgtcgatgacggccggttgaggcgctgtttcgcctcaaaatggttgcccaggtggccctctggcgaaaggcaccgaatacgttgcttatttgcgcagggtcgaaattgaacttcgaaagtagctgcgtcagtgaattcaggcaaagaatcacaatcgttttgtcaaatctcagtgaaaattactgatttgtggaaattcctccaaagttgacgtattagccacctccggaggtggcttgttttgaaactaagcataaaattgtcgtaaaaggaagcatgaacaggcaagatttctgagcagcttttttgcatggttcgactctgcctaatacatcaacttagctacagtagtataagacgcgtgcttacaaatttcaagttatttgtggagctgtagtagtactaccaatactaccgataatacgtgcaggcagcgcacaattaatgctacataaaatagtattactgacggtacttactcggtctactacactacatatacagtgagccaatttcccatatacatgagctacacttgaagcccccccccaagtggttaatacctaggatgcttgcaactatgttctcgcacatgacgattaagggcggagcgaagcccgacttctgcatgtggcccaataggatgaaattgcaggtggtcttgaggtccttgcggcccggcatcatgcacgcgaacagtgcgtagtggcgcggtcgacggcgtctcctccaaggtcgaccagctcaccgatagcacgcatagggctctcaactcggtgcattttggtagcgtcaatacacccaacaccgacgataacttaagactaagattaatgtcagcttaacagatcctgcggctgcgaagcaggcgcaggtgaagcgctgtagagagtaactgggctttacaacaataaggttacagtagccccagaaaacgttcgaccaggtccttacatacatgcttctactaaatttcagagctttgtctgatagtctagagttactactgtagtattattgttggaagaaacgttagaacttgcagtctgtgtcttgatacgcaaaatggagagtgaggttagaaagctaccgcctctacctgcttatctacttgtacctccgtctgaactggccggcgctctctcctgatcgtagaatctgcagattctacagatcctcatttcaacactcctcctcgctgacgatttcagtgattttcttaaaacttcagtataacccgattcgagctcgaagctcgagcatctttggtgcagacaccgcctttgccagcacgtccgctagcatttccttggtctccaagtattcatcctgcaacccaccacgttgcacgtaatccccgacgaacttgattcgcacgtcaatataccttgccttgccttgcctgacgactggtctccttcgagttgctttagcgcagcttggttgtccacgcatagcttcatcggcacctcgagcaacaccttcagctcgctcagaagctcccgcactccaagcaattcctgtgccaccacagacacggcggtgtactcagcttccatcgtggaaagcgagacaccaccttgctttttgcagatccagctgacggcatggccggtcaacttcctgcagtcttatcagccgcatagtctgcatcactgtacccaaccacgcgcatcggctggtctaaaccaccgtgtcctttcatacacagcttcagcgacctcattccagctaaatagcgcagcacgcgcttagctcacttccaattcgaaactgttggtgcatgcgtcctacgcgtcgacttgtgaacggcgtacgcaatatctggtctggtgcagcagctgatccagagcaaacttccaactagagataagtaccagtatcacctttcgtcatatcgatgacagctgcaaacgccacgccgagttcctgctcgttgccgcggctacatgtctagccttcagccgctcaatcaacccttcgacgaccagcttcgtcttgaagacctacttcgagcgcaagatgcgcgcgttctttggccgtcgcaccacttcctagacaccgttgtgctccagagccatgagctcttccattatgacttttatccaggcggccttgagtcggccgcgtatgacctctctgtagtttctggggccgcgtttcatcacgttcttcacgacgtttcctccagtcgtagtctgctgctcggcctcggccgattcaactcacacaacttgcacaactgaacgagtcacatgtctttccctcgtctaagatctctttttcttggctgtttttatcagcagctccgccgctctgctcactagactcctcctccgcctcagcttcgcccccgtcttgatacagtctctgcgcctgcaagttctcagtcttgttcagggtgtcgattttctgcacgtgctgagacgtcaccactttcttgtccatgggcaagtacaccctgtaccccttcacctcctcgccgattccgatgatcctgctgggctctctgcgagaagttcttgttgctcggtgctctgtagaccgtgcatggcgaccccaagaccccgagcttgctgcattgagacgcctccttcgtcaggaccttcagcggcgacgcacattctggatttacgttggtcggcgctgtgttgagtatgcaggccgcgtactgcaccgcatcttcccaaaaacggagcgccagttcacacgcaaaaaccacgcaacgcgccatattcatgacggtgcgatgcatccgttgtgctttcatgttgctaaccgggctgttggcttcgctgcgctgcctcgctacgcagtggtcttgcagaacagatctccattctgatattctccgcccgaatccgtcctcagcactcgaatctgaccattgaactccttctggaaaacaccaagaagtgttcgaacttcttcgcagcctgatcctcgtcgccaacaccagcctcacatagttgctcttgtgatcaccaaagttggacatgtaccggttcccgagccgatctctaggcgtcatcagccccttcaggtccgagcatatcaccccgccaatgcgatctatgggtgagtgcgcgccactttcgttctgcaattgtctccctttgctctgtttgccttctgcacaagtgtggcagctcacacgcttgtggtccgtgagtgcgacctcagagctcgggtcccgtgcaagtctctctaccgggtcgtagctcaaagggaccagccagttgtggaagtccgtacacggggccaccttgtcgttgctgtgcacctcttcctccagcaccgccataatgacctcgatcagcgcctctgcagtttcacgacctttccttccactaccggcatcttcttccggaggtcgacgtagaacactactcgccttatgaccttggccgctaagacacgccgtccatctcggtgtgccagcgtataccccatcatgtacagagtaccgtaagataactgtgtgtatgctacatactgagctttagagtctgctcctttccgcacgccttgacgcgcaacgtgagcgctcccttcatcctgatgttgagcgggtctccattcggctgcgcgcacgagtccacgccaaatcctcgagtcatgattgttcgttcaccacgtgacgactcgaaccactgtccaagctccggtcactgccagcctcaatggaagcgtcgcttactgcaagtgcgaggttcgctcttccttgcccacacacacagccctcaggtgtccaacctccccgcacttgtgacactgacgagtttctttccctcctcggtccctaatttccccgacgagctcatgcccgaggttcttcttcttgacctggatctcccacgcttgagcaaagtgggcgagctcccccgtgtacgccaagtaatccgtgtgtgtgatgtcaaccttggccatgagcaattttctcaggtccgtcgaggcatactgcacaaccgtccgcctctgagaccaccaccaagtacgtgtagtgttctggacaagtctgttctgggtcattcggtgccgtgaacagatgcatcgcctgcggaggcgttatgttggtcatgaacgtttccagcatcgtcttcatgacgtactacagcgtcggcatctggtaccaccacgtctccacctagtatctctcagcagtccccgtcaagtaattccccaacagtcgaccttcacgaactccgtctacgtgaacccgcaggctgcctgcaaaagcagtatctgcctctcaaagcgcttgtcccagttgaggaatccagatccgagccccatgtagagctccttgccattgaagggcctgatggtcagtttcttctggcgcgtattggggtcgccgattccctcttgaccatgtccatgtccacatccgccttgggcttgacgtggtgggtaaaatgggggtactccgtgcgccgctcatgcttgagtcgtccgtgcttgcgctgcctgctctgcttgctgagctgcgtagaggtccttcaggcgggaaagaggtacctcgtgaacttgatgctgcgctgcgaagtactggtggactggctccactcttcgcggtggcgtcatcatcggtggtggtcttggcgacccagccagcgggtcgatgtgcatgcgcgcgtccatccccattagtgaggcaaactgttggaaaaggtagggcgccgcagggattgaactcacaacatacctgtagaacatagctcgttagaccgttacaccatacaggcgccccggtcgtcgtctctttggtctgggacttgacactgtctgattgcatattccaacacaaacgggcttgcgggggggagtcatgaacgtgtcaaccctcaactcattcttcttgtccgccagcgtcttttccggtatagattttgactcctccagcttgcccatccgcgcggctatagtgcagcagtgccatcatctccgtttctgccctccaccgttacccccagcaccagcattcgtgacgtcgggagcgtggctgctgcccctttcaaaagctgcggcaagcttctccgcttccccggcgtggctcatgccagtcttggcttgagcgacgtcgggcgccggcacgggcatctcctgttcgagctcggcggcttccgaggctgcggtcatttgggctcaaaacctgttggaaggtaacgtaagagcttgccgtatgtgtcttgatacgcaaaatggtgagtgagattagaaaactgccgactctacctgccacctacttgcacctctgtcagaacgggtcggcgctctcgcctgatcgtagaatcggcagatcctatagattcccgaaaatggagattattttttcgaaagtgcctgttataaatgcgggttcctgattggctcatgacactctttttcgtcttgatcttcagtgaacataagagaagtaacgtacttttaaagagctatctgctgaacctaggcccatgacttggtctgttgcagatttaacacaacacatcgtcaaaaccatctaatctgtcttgttgacgtactttattggcttgtcaccgtagttgcgcgaaacgtgggcgatacatggactggattccatagaaagaccgacacatgggcgcgagcgggtataggtttacttagatttagctttgggtttagctttacaggtgcggacactcttagacattagaattagctcctagcggtggagatgctctaaaacaattaacatgggccgctgcgatacgtaatgctccactaccgtagtttttttactttattttccatgatttggacaaaagatcgcgtcgtatcttgccttttgataaccatcacttgccaacttgtcgccgactacaccaacccaagcatgaagccgcctacctcgctgctgctgctgctgctactcttaggcctcagctccatcgcctgcagcagccaagaggaaacctcgtcgacgaccgaagccgccgccacctcggaagttgccaccgtcgacaccacctcctctgaagtcaccacctctgacgtccccgtttctgagcccaaggagtcctcgtgggggcgaatctacctgcgtaacgggctgaccccgatccagtacttccgcgacgcattcggcggtccgatggcacgccatgaagtctccttctacttccccaagcgtgacgaggaccggttcggctgcgagcagctccccgagccagagcagctcgaagttgaggctgccaatcgctcggcggtgctcgtggtggaccgtggcgagtgcacatttgagcgcaaggcgcgactggccgaccagatgggtgccgcagcactcttggtggtgagcccgacagacgacgtgagcgcgcccgtggcagcgctcaaggacgaggacggagagatctccatcgcctctgccatgatccgacggactgccggcgacatgttgcgcatcgcggccaagcagatgcccatccacggacgcctcatctcgatgacctgcgagcgcaagccttacacgtgcaaaccgcgattcgaggatgaggaagactacattgaaacttccccggctcggagtgggttggtgttgtccatgggggtggaacaggacgaagataacgatggcgctcgtctgggcagcttcctggctgcaacctatggcagtgtgctcccaacgagaatgtccctccctctagctgcgccacttgatggtaaccaagcgtgtatcgatgcgacggaggatacctcgacccattcagagttttcagggaaggttgtgctcctaccgacgggcgaggcggggcagtgctccgagtttgaaaaggtttccaacgctcagcgtcgggatgcgagcgtggtgttgctcctgcagcaggacaacgcgaccgtgatgacgcaccctggcgttgaggtgagctggcacgcgtacaacatcacgatccccgtgcttgcagtgaccagcaacacgggcgccaatctggcaactctcaagagcgaacaaggcgaagccgcgagcctgagttttgcagtaagcaacggtattgcagacgcctgggagctggtgatgaaacactcgcaacgctcagcctggccgaagagactgaagagatgcagtaagacactggcgaagctgctcgcacagattcgtggacttggtgctgacgacgagatggaggcggcgcttcagaacgtgttcattaatgtcgtcggcgggagcctccaagaatgggagaaaatcgcacaccccgacgaagatacagaagacgctcacaaagtgccggaagacagctcttcagaaaagatcattcagagtatgaagaaatcgcaagctcgcgacgagctataggacagcaactggttcttacgcttgaccacacgcagatacggctccattcacattgtcttagcagcgttttgataaccagaacaacgaactggataatggtctgaattgttgtggcacccttgcttgacttgatgaagggctgtactgcttaaagtccaatccagtaggaccggccgttcggattgtggatgggcacgtggcgcttaccatcgcccgaagacacagaccactcgtaccaaacacggttgttggactcaagtcgccagaagttcaccacgacctcttcgcccttctggaaacggaggggctcgcgcagcgggaagtaaatggggaaccaactgaacatgccatccgaatgcgtgtccggctcgatgctcagcgtgacgtcaccaaacagcacagagtcgaagtagcccgccagtccatggacgacagcgctctcagcagcggtaaagcgaagctctgcctgtctcctgttgtcgatcctcgcgttgaatttcgggtgcgtgaactgaaagcagcgctgcgtgggagccaacgcgtaaaagttgtgcagtctcacaacgtacggggtctcgaaactcttcagcgagtcgtgcaccttcacttcattccaaagcttcgaggacatcacaggcgccacgaacgatgtgtactcgcgtgggatgctaatgccgttttctacaaaatcacagcaattagcgtcttgcaacagtgacatcattgaaacgacatgtgtacgtaccatgcaaaaagtcttgggcgccatctaaacattcaggggacagctcgttgtcaccaaacgatcccagcagctcgctcaccataatgtcggcgcgctcctccgtgcgccagttgcgcatatccgacgcgatgatcgtgacgttgtcccacttctccgaaatcttaaggttgcgcagtgtaataactgcgttcgggttcttctccacagcaaacatacgcgtcttacggttcgcaatagtagcagcgcgaagagcgcagcgcacgaggggtcctcgaccggcgccaacgaccataacaacagactccttgtcctcgggagtttgctcgagcgcctttgtgatggccttctcgtactggttgtacttgaaggcgtcctgctcaaatgtttcgtacgtctgtgactccaaattgtccataaggggctgcaggggggcctgaaggtagtccagatacggtgcttcgaactgcgccttgcggtcctggctcggacgcttgctgtagaggaagtgcagatactgcacatacggcaacatcttgccacggtgacgtggtcgcccgcacaagtagaactggacattgtgctggaagagctgcgccatcagcttctggtgtcgctgcgaaagcgctgggtagccctttcggttagtcaggaagatgtccgtcggaatgatggccgcctatgtgcaaacaaaccgtcagcaacacgtctacgagatggcaatattgtagctagactgcaacccaccttcacgggctcgccaagccagcgttggatctcctcggcactaggcagatctgccgtgatctctatcgccacgtgtagcttcgggtgatactcacagcgagcacgcagcgagtcccagagttcccacgggtccgtgcgagcctcgtcctcgtcctcgtctgtctccatcatggcagcggcacgcagtccagccaccgcgaccagctccatcgggtccttggcattggatcgctgcttgggcgtcagcgggatgcgcacccagaactgcagatactgcgcctgcgtgagcgactggttcagcacgcgcgcgtagttggccgaggcgtgagcgtgatgcggagtcggcagcatcacagccggcaccgagaggtgcgaggcccaggctacctcctgcttgaagaccttctcagcgctcaggcgcccgtccagcgtgagcgcatccaggtccatccacttggagatgttgcccaccaccgacgccgtccagccgcgcgagtccatgaccagatccgagcgggcttgggggccgtcacgggtgtccgagagctcacggtcgtcacgcttgaagctggcagtacccccgagtcagtggtgtatttatttcaaatagatgtataattgtataattgcattccattaccgagggtggaagagcggcgccacgacgccgttcatctcgtccccatagacctgcagcaagtacagaccatacatagtcacagtgagaagcggaagaggtagatgacagagcaggcagcgcatcacaccttgtcgagcgtcgccggcaggtcatggacgaaggacgtctcgagccccacgaagatgcggctcattgttgctgtggattttggcttggctggtgattgattgattggctcgtttcgattcagtatagtgacatggatagactaatagtgacatgtgtgaccaaaagctgattggctgaattgaattgaattgcgtatcttcactcacttcgaatcaggtgagcattccagcaccatgcgctgcgtgtggctcgcgttgcttctgctctcggcgctgggcgtgcgcgccgagccccaagctacccaactcgtcccagccagcgacgaggacgcggcgctgctgcgctctggagctgaggaaactcgccagcagttcgaggagttcgtggagaacgcgacgctgtctgccgccttctcgggctgcgggctctgccagcaaacaggccagtgtgaccacgccttccgcggccaaccgggccagttttgcgtcggcttggcgtctggagcgccgtgctgctgcccacgggacgcgcagtgcgctgccagcccgtacgagtgtcgctgccgacgcgtagtgcccacctaccactacggcggcgacgactaccatccgagctcgtcatcgagcggagtgtcgggtacattcatcttcttcgcgctgctgctgctctgctgcgtgtgctgctgctacctgccggcgcgtcgcgctcagcaggagagggaagagcaattcgtgtacgctcagcccgttgcgaccggccagtatggcacgtaccccgcaggccaagcgccgcaggctccttacgcctatgcgtcggcgcctgtggcgtacgagtcgtctccgtatcatgagagcggcagttcaaatacgatggccgcgggtgcgcttggggcgctgggaggcttgggcgttggcgcagcactgggatccatgctcggtggccacaacaacaacaacaacaacagtggatacagcggctacagcggtggcgtttccgacaacacgtacactttcagcggcgacacgggcggcggcgatttcggcggggacggcggcgacgacgacatgttcgcgggcgactcatgatcgtcgcagtgaagaaaggacaaggacgaagcagcaatatatgtagtgatgcctaccggtagttgcccagaacgctcgacccacataaaaccaatgaaacgatatgagttgtgcgcgtagcagcggccgcgttgactgggcgaggcctggataaatgctgctgctcaaaatgacaccagccctgatagccggcggagatactacagtagtagtagttatcagaagatggccgctgggtctccactggcatcacaaacgaactgcgccaaatgaccccgatcttgtctcaaaaacgctctactcgtggggcactagtcgtggcaactcacaagctgcaggacgtgaacgcttgtgcgccgtgcccgccatccttcaccacccagctcacccattgagacctgctaaacctgcgcctgtatccctccctccatgccgctagtagcggcccgctaccaccctcctctgactatgcacgcctcttcctcccttttttgatcacaagcaactcgtagatacattttctgatgttttcactttctttgctggggggtcttttgagaagacgcctcctttgctttgcggttgcttgccgaactcagctcgcttccacgcttgcggtcgttcgccagccttcaacgcacatactactacacggggacacgcgagccagtagtcggccgcgcttacttggttacgagcaccttcttgagcgactcgacgcggacggggcccgcccgtgagcgcactgggtaccgctcctggtacacgacctcgcacttgttgttggtcttgatgtccttgcacagcgcctcccataccttgttcttcttcatctggatgggggtcacgggctcctgcacctcctcgccgctcgcgtacacgcgctcgccgacctcggcctccgggctcgggtccagcagctccaccttgcccttgtcgttggcgacgagcaggatggcgcccgtggagcgcgtgcgcacgaccttgaccatcttgaggttgcagagcaccacgaccttgcggtccacgagctcctcctcggcgaagtacggctggtgctccatgaccatctcgagctcctcgcccttgccgatgtccaccttctcgatgtagtggcgctccgagttcgggtgcgccttcacctcggtgatcttgcccacccgcaggtccagctgggagaagacgatcggagagctgtacacgtcggacttgaccatggctttcgaaggctcttggtttttgggttggtttgcttgggcagctggggaggggtcctgcctgcttggatggagaaccgcttgcgcactggaagacaacttggagaatgacagcttcggagcccctggcgttggaagccgctgggtgtacgtacccccaagcatttgaaaggatccagctgggtgaggagccccaagacagcggggccaacttcaagcacggcgggcggggtttccgccaatcgcattggcgcgttcatggaaagggcgcgtccgccgacgccgattggccggaaagtgccgcgggtgcccacgcgcgtgtcttgcctgccgggctcaagtgtgtgcgttcgtgctggcagcaggcaggcagccctcgtgtcccaagctcctgcttctcgatgagaggtaagtcgaaggcgcggcggctataaggtcaagcaagcgtagcgtcctggtctgcggggccctgggccgtgccaaagtgagaccacgtacagtaagcatggaatcgatccaggctgatgagcatcatcgccgcgcgcggcgcttcgctcgaggggatgggcacgtctatgttgaagtcagctcgacctgcgagatctaatactgcttgaagttccagggcgcctggagcttcagcgccccgaccggagcgcggcatacaaagcgcaagacgcgccgacgcggccgagcgcctggagcgctgatcgctgccgtccagacatgcgcacgaggctgcttggtgtgcgctgtccaagcagcagcgggatgtgccggtgggatgccggcagcgctgtgtacgcacgtgttgtcacgctggcttcgaccggagattgactgggctccctagcccgcaggcgccacagcggacgtcggaccatgcagttggtgctgctgctgtacgcacatgctgtcaatgaagcgagcggtgcggtggcgactacacaaggaggaggctcgacgcagcgacactgtgtcacaacttcagaagtatcctcgcgtctgtcccagggcgttaatcggtaattggtagccatgtaaagagatataagacagagtggtgcgagctaaacgagctgcgagccatctttcagtaaaagcactgaagctagtgtaagttggcaagaaattcgaatgcggcaggtttaaccatcgtagaataaaagcgaccttgaacgtgtggtgtcttatctcccgctcgagcttcatgctaaatgtcgccatgagcgcccgcatacttgctaaaacaaaaagctctttacgagagctacatgttactggggtaacttgaagtgggcgaaccctttcaaatctgataattatcaggttttcgtcgtcgagtttgcagaaaaagggcataccaaaaacacgcagtgacgagacctctacgttcattcgttgaaaactacatgtagaaccgcgtcggaatcaaacattgccgacccttgactgcgcgatttatcaagatgccaatgctggagctcacttgtgtcggggatcacattcttcctctgtgatcccctgaatgttcgtcaatgcgtgtttatcggttggccgtgctctgggcggcaggcgccggaaaccgaggaatttccataaatcagtgattttcactgagatttgacaaaatgattgtgacagtttgcctgaattcactgatgcagtatcagtagtatcgtactagcgcgtccatacaattcgcaagtcaaatgtagacctatagtaatactataaatagtacatgtagatagtatgttacctaccacaactagtactacagaatatagtatcactgtcgatgttattaatacatactccggttgctacggtacagtagacaggcgaccccttcctagcggttaaggtgtgggatgcttgcaactaccagccacaaactgggttcgtggggtttgctgcgtttagtgcctttttggtggttatactttttgcactatacaacttgtctggacaaacattaaaacaactttattcgttggtcgtctcgaggattcactacgaaatacaagggtccaagcttctccacaattgttttgcatctgccacctccgccgaaacccagctttttttcgcgatagaacaacgcatataagctcaacggacccaggagatggtgcattcactaaaataaaattgtcatctgcacaacgtattggctttcatgcatcgatagtagcttcagatgaaatatgttatctttaatagaccaaggttttgtgaagccaagtacccagccctataaaagtgataaagtagcaatgagtacagccttgccgaataccaaccacttcaacctccgctacaggtcctccgtccacgggtccacggatcctgcaatctcaggaatgaaccgcgttcgagttgagcaagattgtgttgtgcgagttaagtttgcgtccgcagaagatgataatggtcgacgggcgaaaggctcataaacatcctggcaggctcttagtcaataatgtaggaggagttgcgttgtaatggaaacgcaaatttacataccacagatactgtaggtaacaggtaagtcgtagatttcagagcttcttcgtgcaacgcgcgtgactttgtatctcgttcaattgcgatagcgatagtgactgcgccgccgcggtgaagatgcttacactaagttctatagctatcccagcctatgcatagctctcggcttcatttgatcggcttcaaatagctgcactagcagctttactcctaccccagaataaatgtagtatgtaaatagagacatcttaccaaaaaaataaacgcagttcgtgtaaaagtctcgttgatgatgatattgtattgtgttgcgatatagtaactactactagtgtattggcaacttataaagtggcggattcccacaacgtagaaagacaaagtacttccgcacccacctgcaaatattgtgtgcgtcacaaggttttcggttcatgttcatagtttataggcaacccggagcgttgctccgcgagggttcacaggtcgacgaatagtttcatggacgatgataacggatgataattgagtaaatcccaaagttgttttgtttttaatccttaaaagtactaccagcccaactctctagttgattctaattgattctaacgtgggcatctactgcgcctgcttcgcagccgcagcatctgcccgagaatgcgtaattgaacaaatagttgcgcacatcgaagtgcatcgatgcggaaatgatgtttcagccaaacctttgtgaggttggtaaccagcaagccccgctcttctttatcgtggtgggttctcaggaaccgaaagccaccaattgagattgtctggtctgatgaggccatcggtgacataacaccctggtcagcgtccaatggctgcgttggcaccagcaacgagagagctatttcattcattttgcaggtaaggtataccgtgctcatttttgtactatgttgtgtgctaacgatcagacgagagagctacagtagcgggacgaaggagagacgcatggtgcgttgatcttgaccatttaacttgagtatgttagctaagtgacaataatgatcctcaattcaaaaacaaaacaaacaaacttttaacttgagggcttgggggataaattgcggaatgataaatacgctaatgggccaattccttggaagtgggtgcttcaacgcaggaaaaaatcttgttcaaacgaacgatgctcgtgtcactgtcgagttgagctgattgttttggcgacagacacgaggttgggcatcttcggctaagagtgattgggtattgagcaaattggcatgtaaaaaaatgcagcctgcagctagacaagtcatgttgttcatcttcagctaagcttggtcgattatggcgcaaattgatacgacttcagcgaagccatgactctctcatactgtactagagcgtccgtaagtgtttgaatgcaggttttggtcaataataaacgattagtatcaacctttggtaaataatgtgcataaatcttagcatttatcgacgggtacccgattccggcagatattagcttaaacattacaattaagaaagagagacccggtttggtacccggttttggaaagttacaagttttttgccggggcaagcacaggtcttcgacctgtgaaatatgtcggattccatcggtactcagttctttcaagtctcttaccgcggcaactctgctcggttgtgaagggcggaaacatgtcgacgcatagttaagtaggctacggccttcgtcgtggtgtctgcttccttcacatcgactggggccttactcaacgaaagcctcttagtacacttcggaacaatatagtaattgaaagaagcgaataaatactactgtagtattactatttaccaaatcactgagtcagtagtttcaagctatcacaatcattttgtcaaatctcagtgaaaatcactgatttatggaaattcctcaccggaaacctgattacaacttcaagttggcctattttcgccgagaccataatttgttggaggcaggcaggtgccaactcggcacattgaattcgtgcttcgtctgcactacttattcgtgttgcccgatatgaggcgtgttatccgcatagcagcaaagtgctacagcctaagagacagcaataaaaaacttaagattcttcaggtgcacgaattgccaccatatagctatacttagtaaaccaaaagctcgctcgagcacatatttcacataagtccacgcgcagctactcgtttaacgccctgggacagacgcgaggatacttctgaagttgtgacacagtgtcgctgcgtcgagcctcctccttgtgtagtcgccaccgcaccgctcgcttcattgacagcatgtgcgtacagcagcagcaccaactgcatggtccgacgtccgctgtggcgcctgcgggctagggagcccagtcaatctccggtcgaagccagcgtgacaacacgtgcgtacacagcgctgccggcatcccaccggcacatcccgctgctgcttggacagcgcacaccaagcagcctcgtgcgcatgtctggacggcagcgatcagcgctccaggcgctcggccgcgtcggcgcgtcttgcgctttgtatgccgcgctccggtcggggcgctgaagctccaggcgccctggaacttcaagcagtattagatctcgcaggtcgagctgacttcaacatagacgtgcccatcccctcgagcgaagcgccgcgcggcgatgatgctcatcagcctggatcgattccatgcttactgtacgtggtctcactttggcacggcccagggccccgcagaccaggacgctacgcttgcttgaccttatagccgccgcgccttcgacttacctctcatcgagaagcaggagcttgggacacgagggctgcctgcctgctgccagcacgaacgcacacacttgagcccggcaggcaagacacgcgcgtgggcacccgcggcactttccggccaatcggcgtcggcggacgcgccctttccatgaacgcgccaatgcgattggcggaaaccccgcccgccgtgcttgaagttggccccgctgtcttggggctcctcacccagctggatcctttcaaatgcttgggggtacgtacacccagcggcttccaacgccaggggctccgaagctgtcattctccaagttgtcttccagtgcgcaagcggttctccatccaagcaggcaggacccctccccagctgcccaagcaaaccaacccaaaaaccaagagccttcgaaagccatggtcaagtccgacgtgtacagctctccgatcgtcttctcccagctggacctgcgggtgggcaagatcaccgaggtgaaggcgcacccgaactcggagcgccactacatcgagaaggtggacatcggcaagggcgaggagctcgagatggtcatggagcaccagccgtacttcgccgaggaggagctcgtggaccgcaaggtcgtggtgctctgcaacctcaagatggtcaaggtcgtgcgcacgcgctccacgggcgccatcctgctcgtcgccaacgacaagggcaaggtggagctgctggacccgagcccggaggccgaggtcggcgagcgcgtgtacgcgagcggcgaggaggtgcaggagcccgtgacccccatccagatgaagaagaacaaggtatgggaggcgctgtgcaaggacatcaagaccaacaacaagtgcgaggtcgtgtaccaggagcggtacccagtgcgctcacgggcgggccccgtccgcgtcgagtcgctcaagaaggtgctcgtaaccaagtaagcgcggccgactactggctcgcgtgtccccgtgtagtagtatgtgcgttgaaggctggcgaacgaccgcaagcgtggaagcgagctgagttcggcaagcaaccgcaaagcaaaggaggcgtcttctcaaaagaccccccagcaaagaaagtgaaaacatcagaaaatgtatctacgagttgcttgtgatcaaaaaagggaggaagaggcgtgcatagtcagaggagggtggtagcgggccgctactagcggcatggagggagggatacaggcgcaggtttagcaggtctcaatgggtgagctgggtggtgaaggatggcgggcacggcgcacaagcgttcacgtcctgcagcttgtgagttgccacgactagtgccccacgagtagagcgtttttgagacaagatcggggtcatttggcgcagttcgtttgtgatgccagtggagacccagcggccatcttctgataactactactactgtagtatctccgccggctatcagggctggtgtcattttgagcagcagcatttatccaggcctcgcccagtcaacgcggccgctgctacgcgcacaactcatatcgtttcattggttttatgtgggtcgagcgttctgggcaactaccggtaggcatcactacatatattgctgcttcgtccttgtcctttcttcactgcgacgatcatgagtcgcccgcgaacatgtcgtcgtcgccgccgtccccgccgaaatcgccgccgcccgtgtcgccgctgaaagtgtacgtgttgtcggacacgccaccgctgtagccgctgtatccactgttgttgttgttgttgtggccaccgagcatggatcccagtgctgcgccaacgcccaagcctcccagcgccccagcgcacccgcggccatcgtatttgaactgccactctcatagatgccacgcaacgtaagttgccagagattaatataatgccagagaggaaggcaaatcgatgcacgtcctaaagtctcagcagtttattgacctgctgttgctgcgttctatgcgatggtctcgcccactttcttggcggcgtcctgcagcgactggagcttctccttctgccccacgtccagcagctgcttgtcctcggccgagagctcctggccgaagcggtccttcttctgtcgcatgagcgcctcgtacgcctcccactcgcgcaggaagagcggcacgaacttgggcgccgcgttcttgtggcgcttgaactcgtcgcgcacgtactggtcccctagcacgcgcatgtgcggctccagcttctgccggtgcagcgtcaggatgcgcttgtacaagcccagcaccttcgcccggtccgccatctcctctgcagcctcagaaatctgatgggggttacacactcaggttacactcaggttacgacacacgtaacctacttacaccatggagcctggagccgcacctgggttacaaatcctatagtcgagctaccttccttacccgatgccgatgcgctccatcgccaacgtgagcctcgactcgtggctcttcggggaggacaagcccagcgacgcgggcgcagaggcagcccccagccgcagctcagtggtggggctgacgttcccgcaaccgcggaagcgctcggtccgcctcacgggcaagacgtcgccgctgcgcaatggcgtgcccgacccgttccccgtgagctccaagctgcgcaagctcttccgccccaacaagctgccgcagtggaagcgcggagggaaggcgacgcagatcgacaagcagcggcagctcgtggggctggacaccactagcttccagaagctgcagggccacgtgccgttcacgctcaaggagatcgtcaaggaccccaagaagctgccgtacctgctgcagtggctctcggtggacacggagatcccgagcgacgccacgcacagcaactaccaccaggtgctgctcttcctcatggagatcgagcagctgcagaccgtggacgaggacaagcgccgcgaacaggcgctcaagatctggcacaagtacatcgacaacgcgtccgagttccagatcgccacgacgctcgagctcacgcccgagctggagcagcttgtgcgggacaacattggcagcagtagcagggtcaacgacagcttctttcccatccagaaactggcctacatgcggctcacgagggaggagatgccgcgcttcctcaagagcgacgagtacctcaagatgctcattgataccgaggacggtaccaggaccatcccgatggaaaggatactgcagcagccgcgcgcggcgcattactttttactcttcctgatgcagagtcgacagcacttcgagctctacttttggctccatgtcgagtacgtgctgaagcctgtgttggaggaggcaaactacgagctgttctggcggctagcgcgagtgctggtggataaggcgcagaacgactcacaggccatcaccctggcgaccaagaacgatttgtatctcgcgattgccagccgtcgattcgacgagaagcttcaagccccgcagccagttgccaaggcgctgttcaacaaggcgcagcaggagattttcgccatgctgcgctcgtcgtggtttgatcggttcacaaggagcgatctgtacaaggttgcgctgcaggactcgcttattcacttcgaccttgtcgagtcaaaggaggattctcctcccaagttgctgtccagagccttttcgtccgcggagtattccagagtgcaagctgtagatgaagattccgcatcgatgagtgaaggagagggcgaagaagataaagctgaggaaggagacgaagaagctcgtgccgacagtaagggtactaccgacaactcagaccacatgagcgccaaccacagtgaacagggcagtgaaagcgactctgtggaggagagtgaagaccgcgagttcgccaaagtggtgttgaatctggagagcattattcggctgacgaagctgcctgagggtctgcaagtgcactatcggccaaattacgagtcaccaaccacgaatacccctgccccgaaggaggatagctgtggaattgatacaatactgaccttcgcgacgttcttggagacacaggaaagagaggatccagccggtacacttatgctgatgcccgttccaaatccacacaaggacaaggacagcacggacgagtcattcgatgacatctcaagacgaattaaaacgttccttgttccgagtggtcggatcctcatcaagcgagcaggaggtgaaaaatgccctgccgatatgttgttcccgttccagcagagcggtcgcaatgggtttctgttcggatcggtctacttgacgtatgagcgtgtgcacgtgggaacttccaacgaagagcactatgttgctaagggtttctgcctgctttctcatctaccgctggtaaactcactgagaaggctagtggaggagcacgtgcagagctcacaagagcaatccagtatctttgcacatgaccggctagctttactgttccagagcagcatcagttggaaaaggacgaccatcacaagtgccaggagtcacacgtatgtacacccagaaatgcgacgcctagctcatcggaagcacagcagcattctgagtctgccgttgagtacgctggaaacgcaggtcgatgtgcccatggcgattctgtttgagcagtttggaactgcgatggtactccaaattctggcgagtgctgtgctcgagtgcagtatcgtggtggtggcgagtcagtattcactgttgacaatgtgcgccgaagcaatccgcaacctgctgcgtccattctcgtggtgtcacgtgtacgcccccgtattgccgaagccgctgctctcctaccttcagtgcccaacgccaatcttggttggcgtgaacagtgagttcgcgctgcgatcggatcttcctacgcggggcttatacctcgttgctgacgtcgatcgcaaggttgtcgaatacgtcggtgaccagtccgtggcgtggcgtaatatgggtctgcgagatgaccttggagaagacgtcatcttccttcctcggtgttttgaagctgcgaagcaagagctggacaggttactcttcccaagagctctgcagtacgactcaatcggcggatgcgatacactggcccccgacaacgtcgattgctccttcgcttacgcttctcctcctgacacggaggccgagcgcgacgaacaagttcgcggcatctgcttcgacctgttctcagagctgctgagtggccacaccaacgcttgtctcgtggttggagacacgaaggagtcggtggtgatctttgacgagaccgagtttctcgccactcgtgctgacgaagatttaccgttctaccgagctctattgcgtacccagggcttctcagaaatcgttagtgcgcaccggattaatatgagctcgaaggagactgaagccgatgcagaagccttagaggccgatgaggacctgcaggaaggaataatctaaccgggcattgtaagtaaatgtgaatcactttggtgtcgtgcacagcttgcatttacagttattgctccctcgcagacgcatcagcagtgggctcttcagcttcagttcgatgaaccttcttcgccggagtgccttcaatctcagcctcgtcgtcagcgttttcgtcgctgcgacctcgcttgagagattgcacatcggcggtgtcactttcggggttcgtaggctcttggctgccattcaagttcgcaacctccatttcggcggtgacagcctcagtagcatccgggagctcaacgccagtcatagcactatcctctgcggcaacgttcgcaggcgccggagaactcaccgcgggatcgttagcagcgacgtcttcgacgctgtctagctcttgggttgcctccgcttccgtggactgttcttcgcgaataccatcttccagcacttgagtgtcttccatgtcctgagtttgactcgcatcatcgtgtaacgtcttggagggctgcacttcagtcgacgaatcttcagcgttcatctcttcatcgtggacagcatttgaggcagtcgcaggctcgccaccagtaggagcatcaccggtgttggttgactgagaaggctccgccgtagcctgcgttgagccgcccaacagcatgtcatcatcgctgtcttcatcactcagatctgctccacggcgcagacgtcgtctggggcgagcagtgtcgagcgttgcgaggtccttctccaatctggattctcgcacagcttcagtactttcttcctgttcaccattttgctcaccgtccgagttagtttggtcattctcatcctcatccgatgaatcgtgagtcttccggtgaagtttcagatatttcacgcgacgttcgatttgctccggggttcggtcacgttcctggaacatgtcttcgtacgaaatgacttcgtacacggatggcaggtggcgatacttcataaaaaccttcgcaaggtagcgatcctcaaccttgctccagttcttggcacgctcggttgctgcacgagaaatgggtgccttccgctttggcttgggcttggcaggtgaagcaccttccgaggggtttgaagaagcgtcgtccgcattaaattcagcctcgccctcctcttgctgaccttccttgtccacgagagaggtcgactggaaatccgatggccctagcgtaaactggaactctgcctcaccctcgagctcttcatgatccagcgcaattcgatgccgtcttgactcattaattgcctcgattcgcctctctcgtcccagggcaaccgcctcggacttggatttactcattgagtcaatgggatcgtaattccgctggatcagcatgcatgacttcgacggatacggctggcgtagcagggcctcaacaaatagcaaattgtttttgtcggccagcgagaagaaatcccgaacaacaccacgaatgaagtccaggaagttcttgtactcaggaaggcgctggatgtacgtgtcttggagcatcttgttgaacagtagcaacacgtggatgttgaacagtattggctgcatcgtccattcctcttgctggtagatctggaagtgctttgtccggtagaagaacgagtgaatgtagtgattcaccttcgcgctgttctcacggtagtcggcaagcagtgagcagtacatcctgatggtgtcggacgacaacatgcttgaaaagtacttccgcacatcgaaatcggcttcctttcgctgcatttccatcaggagctgcgcttgcctttcagtttcttcttcatcagtggagcttccatccgaatcctcaccctctttagattccccatcaccacgttttttcttcaggcgcttcctgaaacaatgcgaaagtgagtgtcaaagcctattgcatgcagcctacaatcataaaacaacgtacttgtccaggtaagcctttcttcgggaaaggaccttgatagttccctgagagtcgagtaccttgaaaaccagctgaattgaaagcagcattcacgcacagctacgttagtccaagccacccaatgaatcgattcaaaaaacaaggatggagacgtacgtgagtaagagtaacgacgtctaccacgtatgccttcgggaaaagacctggggaccacgtcttgagcagtactggcaggcgatccaggaagtcacgttcgtagaaaatcttgtgctgcaaggaatcagcaattcgctggaaacgagggtcatcactcgccgtgagctcagcgagatatgccatcatttccgccaaaagctggacagaaaccgtcatgccgtggtagttcttcatcgttgcgtagttttcgatcgactgcagcacaaagttgaacgagaacatatccaacgtagacaaaactgccttttcatcatagtcgggtttctcaggagccggcggtgggggtgtcgtgaaatccaaggcattttgaagctccgtcgtcttcttctgcacagccttcagctgatgcttgtagtgcgatttgagagcttggaccttcaagcggtgatacgtagtgaggaaccagacgaggtggaagtactgaagtcgatctgttgagatcagtttgctgcttcctctacggaactcgttcttcaatgagttcgtgagctggaagtaagacttggaaacgatagagtcgcagacctcttggagaacccgcatcgtacgcctgcgcaaaagttaccacgcaaaaaaacacatactaatcagcaccttcctcccacgtcaatagtcatccccaagcatacaacccactcgtccgactcggtcacttttcctttcccaccaaaaatctcctggatgtcggtcactggggcagcatttttctttcctctcctccttgacaccggcttcttcgctgcctggggcacctgatcatagaccgttttcgagaagtcggacagcaccgtggtgcgtccagtggggccgaccatggtcaggacgccgccaaagttggagtggcgacgtgacccagactggtgcagggccgacgccttcttctcactattcagcttcgccagtagatctccaccggccggagccgcattgcgagaaggtcgagagttacccacgggcgtagagttagcagccggctgtgcaccggatcccttggccgtctcgcccgtcagctgcttcttggcgaacgccacgacggactttggctgggagcagtcgagcgtgaggtcgatcatctccatgatcagcaagttccactcgcggttctcttgcgagtcgatgtcctgcgcgaacaacaggatcatctcgtacacgttctcctcgtgcagcgtgcagatgaagtcctcctgcaggtggctgaagtaggacgtggtggacgtgacgaagcgcgggtcctcgttcgggatggccagcaggttccggatcagcgtcagcacgatttccatgttcagatagtcctgcgccgtgcgcgccgagcccttgcgggacagcgggtccaccaggatggtcatcatgatggggatcacgccgcagcgcaggaactcgtgcttgtactggcgcaggtacttgagctgctgcgcgatgttggtcgagtcccgcgccggcttcatggtcagcatgacgagcaccttgaggatggagaagacgagcgaccagtcgtgctggtggttcacgagcagcggcagcagcttcttctgcaggatcttccacttgcccagctgcttggccaccagcttgtgcttggcgtggtcgcgccgcaccgcgcgttgcaggtcgtggatccactgctcgcagtcctcgccgcgcatgagcacgggcgcctcgcccggcgccggcacgcgcagcatgcccaggttggagcacacgagcagcagctcgttcatcatggcggcgtccagctgcggctcgttggcgtccgcgtcctcgtccgaggaggacacgccgaagtcctccagctcatcgtcatcgcgttgggcggtggcgcccgtgggtgtggcggcctcgtcgcggtcggagccattgccgctggcagcggctgcggtcgaggacatggtggcttgagtgctgcgattggcgccaaaaccgacccgcgcaaaaacctaactcggtggtgtttggtgtggtgtggtgtggtgtgggtgcgatgctaagtgcgatctttgtttttttggccgaaatgattcttgaacggattttgaaggacattcattattgcaggttctactcgatcttttgggatcgagccgagattgtcatgtcacttgggttcactatggtctcattaaagtacggaataagactcgagtgcagagggaaaaactagggcggagcaccggagcagagaaagaccgtgcatacgatggcagtaacacgacatgaatgatttgacttcaacttgaccaacctaaggcttcaatgctcagcgcgagatatttacggacgagcactcctccgaccagatctatgggagtctttgcggatatagatatcgataattttagactcggagacaaccaacgccttgttttagaatgcatcttcgctcactcgccacaacataacccccttcatcttgtcgctaccactaccaatggaagccgtggctacaggcgtgccgcgaaccgatccaccaccaccactcgaagcctgggctacaggcataacgcgaaccgatcctccacaaccgctaacggccatggctacagagcgccgcgaacgtttatcctcgatcctccacccccacttgaatatcctactaaagagacgcggaggctgccattcatgcgtggacccgcgcccacgggtacaacgtctctcgagtgaagcaagagaagaacgtcaacggagaagttcgctatcgactgttcgagtgtgatcaatccggtaaacccaaaaacacaagaaacatagaccctgccggtcgaaagcgacctatggttcgctccaagaggtcgtagtgcaaaatgcgcatcagtattgttgcggttgacacttccgatacggcgggaccctggcgaataaggcacactcgagatgggagccggtctcacaaccacccagccactgacgaggtccgaattcacgtcgcccatcgccagcgcgaagcaaaacaaatcaaggccaaccaatcaaggtccaccaacgagctcagcactctgcaaaccatggctggtgtctccaatggacaaagtttgcgacgatgcttctcaacgacgagtcagctttagtgattcctaaggacatttcaaacgccaaagccgctgctcgtacggcgttgctcgaaaccaagaccagcaacgaggcgctgttcgaactactgcgcaagaagaatttcatttctcctacgaggtggaccccgatacgaaccggcttcgctacttgatgtgggcccatccagctaccaccaagttggcccgctactttatggatctgctgaaagtcgactgtacctacaagacgaatcgctaccgtatgccgttgttcaacgcgatcatactgacagggatgaatactatcttgccattcgcgcaagtttggctgccaggcgaagccgaaccgtatttcaactgggcttttactaagctgaaggagctcatggaagtggcctccgttccgttgccgctcgtggttggctccgaccacgagctggcctgcacgaacgcctccgacactgttttcccgatgtcggataagtttgtgtgtctttggcacatccggcgcaatgttctagctcaagcaaaaaagaagataggggaagtagctgttcgaaacgctgccgctatggggaagaagaaaacgaacttgctggcgaccgacattttcatggcgaagtttgatcagacggttgagtcatcgatgacgaattcgatgaacgggccccggggctgcgcaagctgagcgctgaaatggggagataactcaatgcgcagtggtggccccataagaagcaattcgtgagatgctggacggataaattcagtcagttcgggtgccgagacacctccactgtcgaaggaacccacgcaacaatgaaggggtggttcgacaattctcgtggggacttgctgaagggttttcaggacctgattccgtggtggcttacagcggcatcccgaaacagtcttcgcgtattccatttgtattccggggggttgaacgatattctgcaatcgtcaaaataatcagtgtctgggcaatcacagagacgaacgccttgtgggcgaaggctcataaaattgttgttcatgggctagaaagaagtacgtacacggggacatttcgaagaacccatggctgtccttgcctgcatgagctcatgcgtatcatcgactctgaaggtctgctaaagctggagccactgcactttgattgccactggtggctctcacgagtgcgcctccacgcatcatagagcctgcctccctccgcagtgaacgacaacaaacccaacatgacccccaccgattcggatacggcattcacacacgccgcaaggcttccagattcgaaatcattgcgcaagacctagcagccgcaacaagaaccccagcgcaactatcgtcctttcaagcccttctcaactgcgatgataccgagttccagcaggtattttctccgccccgtacgtggggttatgccggtctgcgagcactagacgaatgaccgctttgactttaaggtgcactgtgatctgcattctaaaatccatacacgtatcttcatctcgatcttgcgttgaagtcaaatcattcatgtggtgttactaccatcgtatgcacggtctttctctgctccggtgctccgctttcggtgctccctagcttttcccgagtgcagacccagagaagcccgttcaacccatctcggtcgatttcagaacaacttgagatttgtatgcagggattgaacccatgtcgctaaaccagcccgaatcgagtatgggtggcttcagcggattatttggctggccttggcggaggtcatcgatctgtccttcgccgtacgaccacgtctaagaacaatgcggtttgtgtgtatggcttattaagttgttgaaaggtatgatagagtgctgagtaagccaggtggtaccgcgacacacacgcgtttaacgcatgtgcgccatctcaaatgtgtttgcttagcctagatggaatacacatcgccttatttagtagagacgaaagtgcttagggtggagctgaagagccctcttttagatcgtgcaccccaagcacaagttgacctccacccccaaggccggggagatttgccaccaccagcgctctcctcccctacctactgttggagggtgtgatgtcacacgctcgcgtctccacgccgcgctacgggattgcatatggacttgcattggatagtgagagcaggatcgtacgaccgtacgtttgcgtagattcgtacgactttgcgcgtgaaaacttacgactcgtatgttatagcataatcgtacgactttacggataggatgcagataaggataggaggccttgcgttctggtcggcctagggcgaccaatcaagtaggtagagttaagcgattcaatctcacactcacgtttggtttttcaacctcgccaacaagcccttcttcttctactagccccacaccgctcttccttaccttccattaggttatgagcccaagcaacgacaactccaagttcaaggttgaggccttcgacgggtccaactacgcgctgtggagctgcaagatgaagatgtacccggtgtcccaaaggagcgcggagctgtctgcgaagtttgtgcgacggctaagcagtctcgcaagcctttcagctcaacgaagaatgcgttggaagcaagggagagcgcacgcaaggacacgtcggtgtgctcggatgtgttgggccccatcacgcccgtctccaagtcgggcaacgagtacatcgtgaccttcatcctgatgaagagtcgctacttggtgacctacccgatgcataacaagagcgaagtgtgtggcgtgttccagaagttccggaaagagatccaaacggaagctggattgaagatgaaggttcttcgcagcgacaacggtggcgagtactggaaccgatcgatggaagcttcgtgtgacgacaagctgatcaagcatgagttcacggtgccggagcagaatgggatggctgagcgggtgagtcggactgtagtcgagatgactcgccgcatgttgaaggagagcggactggacaagtcgtactggtgcgagaccatgctgacggcggtggatattcggaacgtgttacccaacacttccaaccggtgttgaagcgcaagccgcgtctggatcacatgcgagtgttcggaaccgagtggaacctcggagaagacgggaggtctttgtggttcagagaaatttcgggactgagtccttaccctatcctatgtccttgctactggctactctgtactaccgcttgctaagcctaccgctctgggcctatccctacttctgtcgtgcttgcactgccgtccttcaacctggtttgcgtggcgcaatcaagatcttacctcggcgcgtttcggtcggcgggggttagggtcagcgcgttttgctcggcgcgttttgcagaaccgggcgtgctggttgacccgccggatgattatgcgtcgcactggattctggcaccgtgtctcacggcccatcacccacgccgagtttcccgtcgagctcggccctgcgtcgcgcccatcaatccgcgtcgcgtttcatcagccgcgtcgaagtccatcacgcgcgtcccggcgccttcttcctccggcgcccggcgcgcccacttcttccgcggggtactacaccacagtcgtcccgctgccacgcacgcgcactccccagttgggtgtgtcgtcgcagaacctgcccgcgccttcgcttcgtctcgacaccatcgcgtttctgccctcgcagtccgcttcgcggtactccaagcttcatggctcgccgccacgacgtcgacgtcaacgacatcgacctggaggaagaagagcttgacaccgacgacctcgaggccgctggctgcgcggtttgtgccctcggcgcgcatcgtcctcgcctccccgtcgcgtcccaagtccagcttccggcttcagatgccccggtccactcggtgactgctcttgtcgccgacgcgcacactctccagcgcgagaaccaggagctgcgcgcccagtacgaactcgtctcagcgcacaatgcgggcttggctactcacgcgtccgtgctgcatgaccgcaatctcgcgatcttgcatcgtgctcgcgagggttatcgcgcaggcatgatccggctcgagcaggcgctcctctcccgggagcacgccgagcgggattacgccgacgtagaggaccgagtagccgacttccgcgctcgtgctgagcgcgcggacgctgccgaagctctactccgcgccgagcgaggctcctcgactgagcaatactgtgaccttcaaggtcagcttcgggcggcgcaagaccagatcactgacttgaccacccaactcgcgcacactcctgctacgccgcctccatctaccgtgccgctagcgcggctgtttgctgcacaaggcgagcgtgacgagcttcgcatcgacctcgcagccgcccaagccgccctcgctcctgtccgagcgcgcgcggacgccgccgaagctgaacgtgatcaggtgcggcagctcgtgaccactgccgagtagcagcgtgacgccgccctcgccgagcgtgaccacgtgacccgcgttctcgtggtcgtcgagcaagagcgcgaccgtgctctcgacatgcgggatcaagtgtgtcgaacctccacggccctgagacgcgagcgagacgctgctgtcaccgagagggaccgggcacgtcaagccgtggccgcccttgagcagcggcgagacgctgccgtcgccgagagagatcaggctcgtcaggccttgaccgctctggagcagcagcgcgcccctgtcgacgaagagctccgcgcggcccgtgcatcgctttctcagagccgcatggagatcgaggcggcccagaacctgaacgtcccgctgcaggacgaccttcggcgcgtcaacgcgctcttagtggccaacgccgaggagctccgccgcgacgcgccgcgtatccacgagctggaggagtcagtggctactgctacgactctccgtgtggccgccgagtccgagatggcgcgggctcaagctggcgagctttgtgccgcgactcgcgcggtgcaatatcgagctgggtggctgtccatgcgacggtcgtctcagcagcgacgaggagcagtcggcgcgcagacccatcgtcccagcgctcgcgtcgccgagctggaggaggagcgcgacttgaccatccgagagcgcgacgaacgcgctgtggcttggcgtcggatgcttcgagacgcgcgtcggggccgagagctggcgcggcgggtgcgcgacgagcttgctgatcgtctcgccggcgtcgtaacgcgtgtaggcgggcagatcgacaccgctgacctggtcagacgactcgaatccactttcacggtggggatcgacggtgcgatccccctcccccctgatattcctacgtccgcagcagttcctgcggcatccgcggttcctgttcctgctccaactacgtcgagctctggtgcccgggcgggctcgtcggcttcgacggcgggatcgacgactggcgcttcccctccagcaggtcctttgggctcccgtcctgctccgacttcgtccgctgcctcgtcctcgtcaggttttcggcgacctcgacacggcgcgtcgagtcgttcgggttctcagtcacgcgcgtctaggccgtcaggagtggcgtccgctacatcatacggctcttcgccccttcgacgtggtcggcggccctctaccgtggccgacactgcggcttccgacaacgccgctgcgcaggcctcatctgcagctacaccctctgcggccgctgcagctgcagcgcgcgcacgagaggacgcctcgctcttcggatccgagtcttcggacagcgaggaccaagcgcggcgagctcagtccaagcaccgccggctgcatagccccgggtctcgctcacggtcgccggcgcgtccgcctccacgttcgcagtcacgttcccggacacccccgtgctcccgttctgcttcgcgttcccgctcggcctctcgttcgcgttcgcactcgcctccacgctcgcgctcgcgttctcgctcgccctccttggcgtcgacgcgttcggccggctcaacgcgttcggcgcacgcggcggggtcggcgcactcgcgtcactcttctcctacacggccgacgcactcctcgtcgaggggccgtgcggcagccggagctggaccaggcactggtccaggcgattcgggcaactccagcggtaacgactcgtccgcttcctcgtcgtcccgcgcctcgtcgtcccgcgactcgtcctcgagcaccgcctccagcggctcggcggggagtgctccggcggcgcccttcatcgaccctgtgattccgcctgccggaactccgtctggctggcggcagcctcgctacgctccttggcccaagcgggtacgacgtctccgccttcatctcatcaccgtgcaggagttgcgaacgctcttcctgccgccgcccggctggatcattccgcgccgtgttccccccgcgcctgcgaactggaaccgcgccctcgtgactctggccaacgtggacgcgccatacgcgactcgaccgtggcgctacctcgctcaagccgctgaggcgcttctcttcgcgtccggcgacgcggcgttccgcccattcctacgtcggctccggcaccacatcgagcactgggctcaggcgtactgggaggccacccatgagctcttcgtgcagggcgcggcgtggaaaaggtggcgcactgctcgcaactcgcgtcgctcacacgcgggcaaccacctcaacagcctgttgcagctggtggtcgggctgttccagcaagggctcgcagacatggacctcttgctggacccaatggtgcttcactttccgcccgcgcacacgtcgatcggacggtggtatccaggcctccagcacgcgacgttgcaagccgcgctcgacgacatcgacgcgcaggagccctggcgccggttctatcggacgccgctcactgtggccgagatggacgccaacgtacgctgccgagtgacgcgcgatcacccagccttccatgtgccgcgtcttgcaggtaagtttgtccagcaggtttgagtcttggcccatcgttgcagtccgtcgcgtttagttgttgtagccgtaacttcaacacgtagccttgatcctttcccttgtttctttccacttctccacatcttttatgagacggccctccgccgtcccatcttcagcaacaggctggtcctcttcacttccctcatccaatccctcgctccggccattcccagagtcgagacttcccaccagtcctcccgtcggcagcccccctgccgacttagtcgcacccgtgggcgctcacccactaggatccgccgcctccccgttctcgtgcgactgcatcgcctcgaaccggttgcgtcaagtgcgctcgcgcaggaagtcgtacatgggcccgccgcagttgaggtcgagctcgtcgacccgcggtactccttctacttgacttcgaactcgcgtcgcgtacgaccgtaccgggttgcacggccctcgcgcacgttcacgagcttctcgacttcgaaaacgtcgtcatccagttcgcgcgtggcctcccagctggcctccggcaagagctcctcgtcgaagtcgaagcgctcctcggccggcaccgtcagctgcgtcgcgggtcgcgacgggaattccaggacgggcttcagcttggagatgtggacggcggggtacagctgatagggcgtacccgtcgtctcgaggcgcactgcgaacgcgctgaccagatcggcgacgcggaagggtccgtgccacatgtgcgcgagtttgcgcgcataccccggcttcacccgatccaggtacagccaaacttgcgagcccgtcgcgatctcatgtcgcgtcgcgttttcagtttgtcgacgcgctctctcttcaacggcctctcggactaactccaacgcttgtgcccttgccaccttgtagtgtcgctggatacggagcctccaccgcctcgcctcggcgtcccgggtcgacgtgttcccgacggccagcgtcgcttccagcgtcgaccgaggatcccagccgtgcactaagaagaacggggtttcattcctcgtccggtcatgcgacgtgtttagcgcgaaggtaagacactcggcgtattcgtcccagtcgcgttggtcgacgtctgcgatgtacgtcttgatcgctcttgtaaccgtctgcaccatccgttctgcagccccgttggcttggggacgataagcaagcgtcgctcgctgtctctgacccatgagtgtgctgaacgccttgaagaagtcggacatgaagcccggctcgcggtcgtggcggatagcctcgctcgcgccgaagcgcctgaacaccgcctcctcgtacgcctcggccaccgtctgcgcggttcgtgacgtattcgctttgaccacgacgaaccccgtgaagaggtcgacccagactaacagctctatgttgcctttgtaggatgccggcaacgacggaatatggtccatggcaacgacctggaacgggtacgttgcgacgatgttgcccggcgactcgccctggatggtcggccgacccttttccgtctcgcagtcggtgcattcgccgacgtagcgctggacgcatctgaagatcccgggccaatggaagtggcgcctcacgcgttggtacgtgcggccaataccctggtgtccgccttccaggcttgcgtgatagtggtggagtacatcttcccgaagagtctccgggatcaccagcttcatcatcacatcgcgatcctcggcggaatcgtcgcttctcggctggtagtagagccgcccgccttcgccctcttcgtactgaggcgcaagcttttggcagttcttcacctcgcgccgagataggtctccgacgtcgccgcggagatacttcttgaggttgacgatccagaccgcttcgtcctgggcgacgcggatgcggtccaggcgcagtcgttgtaccaccagctcctccaggacttctggaggtcggcccctacgagttgtcgtgcgtgcggcagccgagcgcttcgtcaccgcgaggacgtgttcctccccgcgtcccgcgtccatggccttctcgacggggccatctgcgccgcgcgttttctcgtcgcaattttccgcgtcgagatttttcgcgtcgaggttggctggagacgccatctcgggactcgatgcccgtggccggatgacttcttccaagtggttcaacgtcttcagatcttgaatctccccggggctgtgcgcgttgcggcctccttgacgctgcagagcttgtccagccagtatgtcagctctcgtgttctagtctcgtcgtacgtgaaagactccgtggcgcggccatgcctggagtgcgtttcgcgccttttgtcgtagcagcttcagccctggtgacttgcagtccatctcgtcccgcatctgcctgatgacaaggttggcgtctccgcatacgacgagtcgagtgacgtcgtcgagctcctctagaagagaacatccgagcagcagcccgcggtattccgcctcgttgaccgtgagatccgtcgcatatcccgacgcggcgcgcacgatctcccagttcgacagctgccaaatgacggctctgtatcctccgccttctcgcttcgccttagccgatccgtcgaagctcaagacgtgcaagacctcgtcgcgcgccacgtcggggactggaatgactacaatcctgggcgcccgtttccgtggggcgatctcttctagcgccgcgtcgacgaaggctcgcggtgtaatgctcgcggtcagcgcgccgagaagttcttcttctcccctcatggatcggcagatttccaacttccacggcgagaggatcgcggcccctgtgatagtccccctgtagtcccttggaccggaacaaccaggcgagcgtcgtgtgacgtgtcaagacacggaccggtctccctgctagcatcgtgtagcactcattcaagacgcgcaacagggccaagatctctatttcgacgatgtcatagttcagctcgttgggcttcagcgtgagactggtgaacttcacaggcatgtatgcatcgtcgtggacctgcgtgagcacccctgagatggcccagtcgctgacgtacacgataacgacgggttctcaattcgcggtcgaagtgcatcagcattgaggtctcggcgagtttcgccttgagtgcgtcgaaggcgcgcttcgcgttggtccacttctcttgttcgcggacctctggacgcgtgatgtactcgtcgaaatcggtctccgtcagcgaatacagcgtggctgcgtacaccgcaaagtttgcaatgatccggtggtagtaattgagactacccaagaacgattgcaggctcttgagcgtgcgcaggaactcgagtgccgtcagcgactccagattcttcgacttcgcctctagaccgagtcctgagactcgatggcctaggtagtcgaccttggacatgccccactcgctcttctcgacgctgatggacaagtgtcactgcttgcagacatccagtaagcgttcgaccttctcgcacaggtcgtcccacgacgtgcccccgataaggatgtcgtcgacgtacgacctctgccccagaacagagtgaatacctgggttcaccggttcgccgtcttcgaagacgtcccgagtgctgccatccggagacagcttcaggaacccgtaaaacgcgttgtcgatcaagcgtaggtaaatctgcggcgcgttgcacaggtcgaacggcatacgcagccactcgtacaggccatcggcgtgatgaaggctgagatgcgccgggcccggtctgtcatgcggacgacccagaagccactcgccatgtcgagggagcagtaccaccgatacttgtctaaatcttcgagcaagtcgttgatgagcggcatggggtaaaccatcagctgcgtcagcccattgatgagcatgtagtcaatgcagagccggatatcgacgccgttcttctttataatcacgacaatgggcgactcccatggtgacgtcgacttctggatcatcctcgcgcttagcagccccttgatcaggtcggcaaccttctctctgaactgtggtgggattttccgggcgcgttgttcgacgggttttgcgtcgcccacgtcgatgtcgcagaccacccccagggcggctggcggcaaagcgttacccttgccgatcaaccacttccgtcgcttccagatgatttggtttagccgcgtttcttgtctcgcggcttcttcgggcgggagtccagttggcatgccgaccttcaagtcctcgatcttcacctcggcggtcagcgagaggcccggcagcactgccatctcagactcaagatcctctgcgaagaggtcgacccctcgtaaatgaggactgtgtcctcttcctcctgctcatcaggtttcgccttgtcgagttttggctcggtgaattccgactccggcgattcctccatcgcagcgtttccacccacagtcggaggcacatcgggttcgccttccaccgtctcttcatccgcatccgacttgtggtcgtcgggcggcacctctaccccacttcccttcggcgcttccgcgacagccgtcaacactggggtcatggcgcgtcgcgtcccgagttgtctcggctccgggcgcaaaatggctttaggcgtcgggtatgagggacgatccgtcatcggcccgtcgggctcggctgagatccagctctcttccgcgtcgtgcgtcgcatcgtacgccaagttctgccactgatggtaccgaggggagcccagtccgacgaacccacggctccgaggctggccgtcagacggcgtccaccacccaagcgtttcatgtgcaccgagggtcggtgcgtctccgatgtttgtggcatgtaggtaagccttccttccgactctccccttgacaaaggtagtcacccacgactctgtccgtgctacccacaggaacggcgcgtttcgatccggcctcagcaagatttcatgcgtgtcccctggttcgagtctcacaggcgccttgacgttgaccgggtgcatccgtgcgccgtatagcggtcttcgtccgatcatctggatatgcacctcgtcggggaggaacgccgtgccatccgcagtgtcgatgcgcactccagctggcaccatgaagttcattcccaggattgcgtgttggccgaccaagtcgccgacccacaggcaccaagttcccagcaaaggtaatcttgactctggttctccccaccgtgtaatatgtctcatcacgaattcccacacactcttgcgtgatctccgtgtcaatcaggcagcctacctcacgagcaaaggtggtgtccaggatggacacctcggcacctgtgtcgagcaataacacaacacggcagttgttcagcttcccatgaatcttggcctgcttgtaccacttgtgcggcgcataatgtttccagtatccgcgtcgctctcctggttgcaagtcgatctcgtccaggggtggttcacgtgcaaactcgtcgtccgtcgtgcggcgcgcgtcctcgtgtggtacgttccaggttggattcacatgtattatcattcagggaagtcgggctcccactaaccacctctcgcgacttcttggtcacatatgcatagacggaaacaggtcgctcgtctcgtactggtttccaagccagcgagcgtcctagtttaacaccttctcggcggccggcggcagcattcccgcgtgtttattcgggtcaaaccactggcgcaattggttgaagaactcctccatcgggcattctccggcttcgtgcacgtcaccgcaggccttgcacaccctcaagcatcgctccgtcgggtgcttaccaccacacttctgacacgtcaacaacttccagcagtctccctcagcatcgcgacgaaaaccacggtggcgacaatgcggacgatcgcgtcccgagtcgtcgagatgaaagttgcgacgcgccgactctcccggcggggcctgccccgcgacgaacaacttggcgcgttcttcgtcctcctcgtcttggtcgtactggcgatcgtcgctgtcgcgactttcgcgttccgagtcgtactcgtccgacgcgacgtgaatcgcatgcacggcgcgcgccggctgagtcggcggggtcggcgccttttggcggaacttgttcgagccgaagagagtctttttctggtgaatcaatccacgttgtcgggcacgcagcttcttctccagcgccacggagtcggcgacctccatccgcgtgagacgcgaggcgagttcggcctcctgcgtgttcagcgtccggatgaaatgctcgacgtgttcgcgcttctcttcagtcgtgccctcggcgtatgggatgttggccctcatgcccgcgacgttgagccggtacaagtaatccagaggggtctcgtcggagcgctgagccgcatggtggtagcgactggccattgacacgcccttgccgcagtactgcacccggaattgctccatcagctcggtccatgatttcttgaccttcctgggcaactggagataccattggcgcgcagggccgctcattagatcgctgaactgcccgcacacttcttcgcccgtcatcccgtcgcgccgcgcggcggacatcagacggttgagccacagcctagccttttcttctccggcatctcgtcccgagaagtccttcagctccgatgaagccgagaggcgcgtaatcccgacaccggctgtcgcggttgagactacggccgcggctctcggcgtcccgacatccaagtcaaacagatcgtcggggtcctcgtcgagggacgcgacctcacggactccatcgccacatcgactgtctcttggggacgtgtagatgctgtcgcagggtgtgtcggctacttcgacttcacggggaccgcgggcgtctcggcgcatggggctcgcatcatcgttgtttgcatcaacttgaatatagactcctccagagccttggggatcgcaccctcggctggtttcgcaacctcggcgcgtgccggcgcagcggaaagctccataacgcgcgggggtccgttcatgggcatgcgcttcggcgactcgaaactgctgtcggagtccgcgctcgactggtaccgtgtcggaggtgacggcgaagccgccgagggctgggccaggaccgtcgcaggactcatcacatcttgacccgtcacggatatcgccgcatctcgtttgacagacccagcgagaatcgtcacgggctccagcacgacgcggatcgcgcgtaaccaggacttgagatcccagtcgcacagcctctccatctggaaggctcccagaacaaagcccgagtcgcgcaacatctggaagagggtcggcgcggcttgggcgacgctggtgataccgtcgatgtctggcgcgacgaaggggtccgtgaagttgctcatcagcatgagcttgagaaagaccaagatcgggtcttgctccagcagccggaagagctcagtgcgagacacgaggtaccgcacctcttcgatggtgtactggcgccccgcgtccttgccttgcggcttggacagcgactcatccgccgaggccggcgcgcgaagtttcttcttcttcttcttctgcttggacaacttgcgcttggtggtggccttggcggtgggttgttgttggtcgtcggcctttgcaggcttccgacccgtaggaccgcgacttgcgtcgcggcccttcgcggctccctcgtcgagagccgcatcgggaacggcaaactgttcttcgtagccctcctggtcgtcgctggccccgtggcctgtcgtgaaggttccctcagagctccacgacgcgacaggtctctcactgtgctctcttgcggtcggcgaccttcccgccgactgcgcacctgcctccgatgcctcttggatcgttggcccgtcattcgaagtagtactcccgggtcgcggcacacttgtggagtagcgccctcacagaaatctcgcgaatgcgatctcgcacaaactcggcgcgtctggatagcggtcgcgccgagcaaattattcccggttgttggagtagcgtatctccgaaatacaggcccaagtcttcgcaggcatcagagttggggggggggttcttgtgttgacgcttgttccttgtcgtagggcgtcgagcctcgggcgtgcggcgttaacgggccggcgtttcttcggcgttcccgtcgggcgtgcggcgttatcaggccggcgtttcctggggcttgtgtggcgttatcggcgggggtcttgtgcacggcggttatcaggccagtgcggtccttcgcctaggcagcgcgttatcgggcgcccacctaaacggtatacgtttaacgtgcctttgttccagcacgggtctgtggggggtgagcacccgaaccagcaaacgacggggggccgcgatatcgaggcagctctacttgccggcgcttggtggttcccctggaacctcggagaagacgggaggtctttgtggttcagagaaatttcgggactgagtccttaccctatcctatgtccttgctactggctactctgtactaccgcttgctaagcctaccgctctgggcctatccctacttctgtcgtgcttgcactaccgtccttcaacctgatttacgcggcgtaatcaagatcttacctcggcgcgtttttcagaaccgggcgcgctggttgacccgccggatgattatgcgtcgcactggattctggcaccgtgtctcacggcccatcacccacgccgactttcccgtcgagctcggccctgcgtcacgcccatcaatccgcgtcgcgtttcatcagccgcgtcgaggtccatcactcacgtcccggcgcccggagcgcccacttcttccgcggggtactactccacgcaactcctactcgtcgggccaagcacagctgctcctgtcagcgtagatggcgcttgagagaaagctttagcagaattcctccgacggtacatgcgtctacggactcctcatcggcccgttggcgtggatgtgggtgtacctggacagcaaggaggggcgcttctgccggacattgcttcagccggacgacctacagccaagtatctacatgatggtgacgatcgcgcgtgcaatcatgtgggaaagtctcattatcaagacttcgcagcagttgcgaacaaggaccatttacatcgcgcacgtgcaccgcagcggtgtagacatgaagcaacgctggatctcccaaggattatgatacatcaatcgcccaccatgctgatccatgctggattggaggtctggtcggatgaaacagcagggtctacaaaatcgattcattacactgccccatgattcgctaacaacctcaaacatcatttttagcgatctgtgtctattcgaatcaagttttaaccatcacaccgcgttcttcttcgtcatgcgtcgttgcgtctttagagatggagagaatcggaagcggtccgctggagacactggctacttcacaccgctgcggtgtgttatactcctctcgagttctgagcagctgcttaccttcgtgtcatactggatactacaactgttactagcgttagcactgtagaaacagtttagaacgtatcatttttaactgaataacgctcgttacatagtccttattttttatgcttattggtcatctacaggccacttcaaaagtgaaaaaatcttgacaattcctgtattaattttgtcaaacttcaacgccacgcttgccgcacgacatggacttgctcgttggcgcgatacttcgataccggggcgcgagctgcccccatagtaggaaatagaagtagttgaatgcgagcgcgactgcggttgagtgtcgcccgctggaagccgtctgatgaaatccctcataacaccccacacaggatagaggtaaaacaaaatagtatcatttccatatttagggctatattcataatcactactcagtattaatgtatttcccttctagacagctcatgggtgaagatactgagttgtgaccacattggtagcataaacgatgcatattcaacaccggaaatgtctttctctacacaccattgcgggcatggacttcaaagggtaaaaacgctttgacgttctgtgtgggtggtcgggtcggacttgtacgccgaatgatccaccggctttctcaaaaaagttcaaactagtagcgaccacccaccataaatgtacatgtgacccatcggggcagccagccaacccacctagacattcgttgtgcagtgttcgaccacgttaagtagcatacgacttacccccccccctttgcgctactgcttccttgaataccgatgctgataatgcctcagcaacaagctgggcgtccacgggttcgccgactcggtggttaccaaggacagccaagagctcatcatcgtcgaagccaagcgtcaggcaattcctactcgtcgnnnnnnnnnnnnnnnnnnnnnnnnnnnnnnnnnnnnnnnnnnnnnnnnnnnnnnnnnnnnnnnnnnnnnnnnnnnnnnnnnnnnnnnnnnnnnnnnnnnnnnnnnnnnnnnnnnnnnnnnnnnnnnnnnnnnnnnnnnnnnnnnnnnnnnnnnnnnnnnnnnnnnnnnnnnnnnnnnnnnnnnnnnnnnnnnnnnnnnnnnnnnnnnnnnnnnnnnnnnnnnnnnnnnnnnnnnnnnnnnnnnnnnnnnnnnnnnnnnnnnnnnnnnnnnnnnnnnnnnnnnnnnnnnnnnnnnnnnnnnnnnnnnnnnnnnnnnnnnnnnnnnnnnnnnnnnnnnnnnnnnnnnnnnnnnnnnnnnnnnnnnnnnnnnnnnnnnnnnnnnnnnnnnnnnnnnnnnnnnnnnnnnnnnnnnnnnnnnnnnnnnnnnnnnnnnnnnnnnnnnnnnnnnnnnnnnnnnnnnnnnnnnnnnnnnnnnnnnnnnnnnnnnnnnnnnnnnnnnnnnnnnnnnnnnnnnnnnnnnnnnnnnnnnnnnnnnnnnnnnnnnnnnnnnnnnnnnnnnnnnnnnnnnnnnnnnnnnnnnnnnnnnnnnnnnnnnnnnnnnnnnnnnnnnnnnnnnnnnnnnnnnnnnnnnnnnnnnngccgaatgatccaccggctttctcaaaaagttcaaactagtagcgaccacccaccataaatgtacatgtgacccatcggggcagccagccaacccacctagacattcgttgtgcagtgttcgaccacgttaagtagcatacgacctacccccccccctttgcgctactgcttccttgaataccgatgctgataatgcctcagcaacaagctgggcgtccacgggttcgccgactcggtggttaccaaggacagccaagagctcatcatcgtcgaagccaagcgtcaggcaattcctactcgtcgggccaagcacagctgctcctggcagcgtagatggcgcttgagagaaagcttcagcagaattcctccgacggtacatgcgtctacggactcctcatcggcccgttggcgtggatatgggtgtacctggacagcaaggaggggcgcttctgccggacattgcttcagccggacgacctacagccaagtatctacatgatggtgacgatcgcgcgtgcaatcatgtgggaaagtctcattatcaagacttcgcagcagttgcgaacaaggaccatttacatcgcgcacgtgcaccgcagcggtgtagacatgaagcaacgctggatctcccaaggattatgatacatcaatcgcccaccatgctgatccatgctggattggaggtctggtcggatgaaacagcagggtctacaaaatcgattcattacactgccccatgattcgctaacaacctcaaacatcatttttagcgatctgtgtctattcgaatcaagttttaaccatcacaccgcgttcttcttcgtcatgcgtcgttgcgtctttagagatggagagaatcggaagcggtccgctggagacactggctacttcacaccgctgcggtgtgttatactcctctcgagttctgagcagctgcttaccttcgtgtcatactggatactacaactgttactagcgttagcactgtagaaacagtttagaacgtatcatttttaactgaataacgctcgttacatagtccttattttttatgcttattggtcatctacaggccacttcaaaagtgaaaaaatcttgacaattcctgtattaattttgtcaaacttcaacgccacgcttgccgcacgacatggacttgctcgttggcgcgatacttcgataccggggcgcgagctgcccccatagtaggaaatagaagtagttgaatgcgagcgcgactgcggttgagtgtcgcccgctggaagccgtctgatgcaatccctcataacaccccacacaggatagaggtaaaacaaaatagtatcatttccatatttagggctatattcataatcactactcagtattaatgtatttcccttctagacagctcatgggtgaagatactgagttgtgaccacattggtagcataaacgatgcatattcaacaccggaaatgtctttctctacacaccattgcgggcatggacttcaaagggtaaaaacgctttgacgttctgtgtgggtggtcgggtcggacttgtacgccgaatgatccaccggctttctcaaaaaagttcaaactagtagcgaccacccaccataaatgtacatgtgacccatcggggcagccagccaacccacctagacattcgttgtgcagtgttcgaccacgttaagtagcatacgacctaccccccccccctttgcgctactgcttccttgaataccgatgctgataatgcctcagcaacaagctgggcgtccacgggttcgccgactcggtggttaccaaggacagccaagagctcatcatcgtcgaagccaagcgtcaggcaattcctactcgtcgggccaagcacagctgctcctggcagcgtagatggcgcttgagagaaagcttcagcagaattcctccgacggtacatgcgtctacggactcctcatcggcccgttggcgtggatatgggtgtacctggacagcaaggaggggcgcttctgccggacattgcttcagccggacgacctacagccaagtatctacatgatggtgacgatcgcgcgtgcaatcatgtgggaaagtctcattatcaagacttcgcagcagttgcgaacaaggaccatttacatcgcgcacgtgcaccgcagcggtgtagacatgaagcaacgctggatctcccaaggattatgatacatcaatcgcccaccatgctgatccatgctggannnnnnnnnnnnnnnnnnnnnnnnnnnnnnnnnnnnnnnnnnnnnnnnnnnnnnnnnnnnnnnnnnnnnnnnnnnnnnnnnnnnnnnnnnnnnnnnnnnnnnnnnnnnnnnnnnnnnnnnnnnnnnnnnnnnnnnnnnnnnnnnnnnnnnnnnnnnnnnnnnnnnnnnnnnnnnnnnnnnnnnnnnnnnnnnnnnnnnnnnnnnnnnnnnnnnnnnnnnnnnnnnnnnnnnnnnnnnnnnnnnnnnnnnnnnnnnnnnnnnnnnnnnnnnnnnnnnnnnnnnnnnnnnnnnnnnnnnnnnnnnnnnnnnnnnnnnnnnnnnnnnnnnnnnnnnnnnnnnnnnnnnnnnnnnnnnnnnnnnnnnnnnnnnnnnnnnnnnnnnnnnnnnnnnnnnnnnnnnnnnnnnnnnnnnnnnnnnnnnnnnnnnnnnnnnnnnnnnnnnnnnnnnnnnnnnnnnnnnnnnnnnnnnnnnnnnnnnnnnnnnnnnnnnnnnnnnnnnnnnnnnnnnnnnnnnnnnnnnnnnnnnnnnnnnnnnnnnnnnnnnnnnnnnnnnnnnnnnnnnnnnnnnnnnnnnnnnnnnnnnnnnnnnnnnnnnnnnnnnnnnnnnnnnnnnnnnnnnnnnnnnnnnnnnnnnnnnnnnnnnnnnnnnnnnnnnnnnnnnnnnnnnnnnnnnnnnnnnnnnnnnnnnnnnnnnnnnnnnnnnnnnnnnnnnnnnnnnnnnnnnnnnnnnnnnnnnnnnnnnnnnnnnnnnnnnnnnnnnnnnnnnnnnnnnnnnnnnnnnnnnnnnnnnnnnnnnnnnnnnnnnnnnnnnnnnnnnnnnnnnnnnnnnnnnnnnnnnnnnnnnnnnnnnnnnnnnnnnnnnnnnnnnnnnnnnnnnnnnnnnnnnnnnnnnnnnnnnnnnnnnnnnnnnnnnnnnnnnnnnnnnnnnnnnnnnnnnnnnnnnnnnnnnnnnnnnnnnnnnnnnnnnnnnnnnnnnnnnnnnnnnnnnnnnnnnnnnnnnnnnnnnnnnnnnnnnnnnnnnnnnnnnnnnnnnnnnnnnnnnnnnnnnnnnnnnnnnnnnnnnnnnnnnnnnnnnnnnnnnnnnnnnnnnnnnnnnnnnnnnnnnnnnnnnnnnnnnnnnnnnnnnnnnnnnnnnnnnnnnnnnnnnnnnnnnnnnnnnnnnnnnnnnnnnncgattcattacactgccccatgattcgctaacaacctcaaacatcatttttagcgatctgtgtctattcgaatcaagttttaaccatcacaccgcgttcttcttcgtcatgcgtcgttgcgtctttagagatggagagaatcggaagcggtccgctggagacactggctacttcacaccgctgcggtgtgttatactcctctcgagttctgagcagctgcttaccttcgtgtcatactggatactacaactgttactagcgttagcactgtagaaacagtttagaacgtatcatttttaactgaataacgctcgttacatagtccttattttttatgcttattggtcatctacaggccacttcaaaagtgaaaaaatcttgacaattcctgtattaattttgtcaaacttcaacgccacgcttgccgcacgacatggacttgctcgttggcgcgatacttcgataccggggcgcgagctgcccccatagtaggaaatagaagtagttgaatgcgagcgcgactgcggttgagtgtcgcccgctggaagccgtctggtgcaatccctcataacaccccacacaggatagaggtaaaacaaaatagtatcatttccatatttagggctatattcataatcactactcagtattaatgtatttcccttctagacagctcatgggtgaagatactgagttgtgaccacattggtagcataaacgatgcatattcaacaccggaaatgtctttctctacacaccattgcgggcatggacttcaaagggtaaaaacgctttgacgttctgtgtgggtggtcgggtcggacttgtacgccgaatgatccaccggctttctcaaaaaagttcaaactagtagcgaccacccaccataaatgtacatgtgacccatcggggcagccagccaacccacctagacattcgttgtgcagtgttcgaccacgttaagtagcatacgacctacccccccccctttgcgctactgcttccttgaataccgatgctgataatgcctcagcaacaagctgggcgtccacgggttcgccgactcggtggttaccaaggacagccaagagctcatcatcgtcgaagccaagcgtcaggcaattcctactcgtcgggccaagcacagctgctcctggcagcgtagatggcgcttgagagaaagcttcagcagaattcctccgacggtacatgcgtctacggactcctcatcggcccgttggcgtggatgtgggtgtacctggacagcaaggaggggcgcttctgccggacattgcttcagccggacgacctacagccaagtatctacatgatggtgacgatcgcgcgtgcaatcatgtgggaaagtctcattatcaagacttcgcagcagttgcgaacaaggaccatttacatcgcgcacgtgcaccgcagcggtgtagacatgaagcaacgctggatctcccaaggattatgatacatcaatcgcccaccatgctgatccatgctggattggaggtctggtcggatgaaacagcagggtctacaaaatcgattcattacactgccccatgattcgctaacaacctcaaacatcatttttagcgatctgtgtctattcgaatcaagttttaaccatcacaccgcgttcttcttcgtcatgcgtcgttgcgtctttagagatggagagaatcggaagcggtccgctggagacactggctacttcacaccgctgcggtgtgttatactcctctcgagttctgagcagctgcttaccttcgtgtcatactggatactacaactgttactagcgttagcactgtagaaacagtttagaacgtatcatttttaactgaataacgctcgttacatagtccttattttttatgcttattggtcatctacaggccacttcaaaagtgaaaaaatcttgacaattcctgtattaattttgtcaaacttcaacgccacgcttgccgcacgacatggacttgctcgttggtgcgatacttcgataccggggcgcgagctgcccccatactaggaaatagaagtagttgaatgcgagcgcgactgcggttgagtgtcgcccgctggaagccgtctgatgcaatccctcataacaccccacacaggatagaggtaaaacaaaatagtatcatttccatatttagggctatattcataatcactactcagtattaatgtatttcccttctagacagctcatgggtgaagatactgagttgtgaccacattggtagcataaacgatgcatattcaacaccggaaatgtctttctctacacaccattgcgggcatggacttcaaagggtaaaaacgctttgacgttctgtgtgggtggtcgggtcggacttgtacgccgaatgatccaccggctttctcaaaaaagttcaaactagtagcgaccacccaccataaatgtacatgtgacccatcggggcagccagccaacccacctagacattcgttgtgcagtgttcgaccacgttaagtagcatacgacctacccccccccctttgcgctactgctttcttgaataccgatactgataatgcctcagcaacaagctggtgaggcgaggccgatgaaacctttgtcgcccaggggggggggtcgtatagcgcagggcaagactgttccccaggggtagacccagagaatcgacttgagagtcaacagcaagaagatagactcagagattcgcagccgcaaagctttaaaccctgagaatcacactccttggttggcgtgggtaccttgtgtaatccctgtccgctcgtttgtcttcgacggaacggcactccaccggttgaaaatgtagcctcgaagaagtgcgggagcgcacgtctacttcagaacgcacctccacaccaaaaggcaaagccagagaatcagatcccctgaaacccagaatatcacgaattcagggtccaggatttcagtcaactctgggacttggaactcagaagacatcttacccaaatgccctcctagctcgataaaaccaacaaatacagagtatacaaacactacaactagccgtcacttattcttttggacccttggacggtgggtcacacacacactaggctcactcgagtctgaaattcagggacctagctcccctgagactcacacaaacgcgcaccacctccaataaaggaggaaaatacaatcactatcagttacctttcccttcacacaagcagtcaatacaaaatcctggaggcgactacctagcaccccagaataccctctggaataatatgaaatgggctaccacgagcacagcaagtgacccaactaggatatggaatagatggatcaccccaggaagctcaaggctgtcgctggtcaccacctaactggacttgagttttgatggagcccacacagacggctgtccttcgccgttgatgtcccgcggtcgtagtctcgggtcctccggatttccgtcggcaggcttagccgaagtcacttgcgcagtacagggtaaaagaaactctgtttggtttttatcagctacttctctctctctctctcttcttcgggcaaatagcttctgttcactatgcttgggatcaaaatgtcttgtcttgagtataccttgggatcagcggtccaaacttgcgatcggcttgcgaatccattgtcgcacggcgtcgaaagtgccaatagtgggtccttagacttggtttagtatggtgcaggactccctctcgactcctcgaaagtatccagtctgtgcatccatgacggttcttcaaggtcacgcatcattttgattgcagactggcttcgaactgactcgaatccctgaaaaccaagtgacactcagggtcatcttctgaaatcctgggaattctgaggaatcatggggaactgtggggattcttgggtgttggctcgggaaacacttaagttcagtatagagagtctggatttatggtccaaacccagagaatcatctttggaactctgggtcacctgtactcagggaggtgaactctgggtcatcgtgcggcactctgggtttccgtgcagcactctgggtaacaagtctgctacattgcaggcctgcgtgcatctccacaaagccacacttttagcgggtttagcggcctcctgcgcatgatcacggtggtagtgggttgattctcagggtaatttgatcctctggggcactctgagccactgcaagatgaggtgtactctgggatacattctccagagacactttccgctagactttaggcactcatcgtaagggaaagtccgcggctggactgagtgttctctgaaattctgggcgtgcactcccaggattcacacttccagccggttgggcccatctgcggtcagacgctggattcatcccgagaaatcacttctctcccacagtcgccatccatgtcacacgggtacagccgcgccgtatccaagtcatccaccaatcagcatccgatacaaactccaggtcacagaggtgacggcacatcgtcggcaattttctggggaccgcctcatgtcaaccgcccctcctggtccgggtccatcaaagaggaaatcgttccgaactggtgaaccatggccaggctacaaaaacacacaggtccatccaccgtcgacttcgatacggccgttgcactctgtcaactccccagggtttcactcactttggcgacaccctgtctccccaacggttggtcaggacctatcttcacgacagtctgcaccgaccgctcctgttgtccgttcgcctgggggcggtacgctagagtggctcgctgcttgctacccaaaagttcacggaagcgcgtgaacacctcactcatgaacgttgggtcttggtcgtacctcagcatcgagctcgcgccgaatctcctgaagacctgctcgtcgtacacttcagcgacatcttgcgccgtggttgaactcatgggtttacacatgacgaatcctgagaacgcatcctgaaaaagcagcaggaacgtgttcccacggtccgacttaggcaagtgtgtcgcgaaatccatagacacaacttcaaaagggcgcctcggttcgatgttcccaggggaaggccctggattctgagggcgccccttgccgctggcgcaatccacacactctttgacgaaaacttccacattagcgtacatgccgtgccagtagaactcagagcgcagcttctcgtacgtcctcctgatcccctggtgcccaccctgaaaatcttcgtgagcgtaatgcaggatatccggtcgcagagctttcggcaccacgagtctgagttcgtcaaccatgtctcggggtcgatctctggtagaccgactcaagcggtacaggacttctctggaatccaacacgaaatcatcagcgaccttcgcgagtttcctggcttgagcgtgcgacagcttcatcgtgtctcctttcaggaaatccttgagttgcagcaggtgatcatctttgtcctggtgcactttgatgcgtcgccagcgttccgcctggtactccagaggtcccatgggttcgctttgggcttcgatctcctgagttcgcatccgagtcattactgcaaacactttggccgccacaggcaacggagcgcactcaggtccagggatacccagagtttcgacaccctgagaatcactcccctgaattccaacgttcaataacaccttcggtcttaccaacttctcatgactcttggacaccaactgcagatgtgttcgttcgtcagcatcctccaccttccaggattcaccaagcgcgagggtcttagacgtcaggtagtctgcggcctggttaaactctcgcttgacatgcaccagccgcacagacttgaacttcgtcttcagcacttcatactcggccagcttcctctggagatttggctgattgcagttgatgagaccctgggcttgctggatggcaatcctggagtccccaaccacaacgatgtcctgaattccacgctcaatcgctagagtgaggcccttcagaagtccatgatactcagcgtcattcacagtcacgtcctccaggatgcatccctgggcatccaggatttcccaaccagggacatgccacagaatgcagccacagctcccttgtcgcgtggaagtcttagcagcgccatcgaagctcagaatacacccctcgtagtccgcttccatcatttccatactgataggcactggagggtttaacgcgccccttagctgggatcaggttttcagcgatctcatccaagtgttctctgggggtaatacccgcacccagaattgcagccaagccgtcttcatcccgttgaactctgcgtatctccaggttccagtgggacaacttcagaccccacttcaccgttcgaccgtctgccgactgcgaggtcagcaaccacttcaacacagaatatcgcgtgtagacgacgagcttagggctgccttcaaccaaagtgcgaaacacctccaggactctcaggatagcaatcacctccttttctgcaatgtgataccgcagctcagcgtcattcaagaagcgacctgtgaatcgaaccgggtgcacaatcccgtcgttctcctggcccaacacagcggatgctgcccacgggttcgcgtggggagtaatcacgaagggccttgaacgatctggatgtctgagcaacggagtcgaaacgatcttgcgcttcaggatttcaaaagcttcctgggctctcgacaggtctctcctggatttcacttgttcctcagtcagctcgtcgtcgggaacggcaagtcttggacccccttcgcgattttaggggtcgctaggatgccctcagcactaatctcgtgagagaggtacggaatggacaacttcccgaattcgctattgggaagactcacagagatattccagtaacgtagtcggaaaagcagcgcgttcagatcctggcacagctgctcccaagtaggcgcaccgtgggcgatgtcgtcgatatacgagcttcgacccaggacagggcccatctgagagggagccgggatgttacgctgaaaaacagtcatctcatccatcaacactgaaagtcgcggtgcattttcacctgaaactctgggttccccagggttcaaccccaaaaagtacaagacatcttggtcgacctcagcttcttcctcagggggaagccgcagaaaaccccacagacagttattgagaactgcctggtagatcagcggcgcgttcttgaggccaaacggcatccttacccactggtagtgcccatagggacagacgaacgcagagatcaacttggctctctcggtcatcttgatagcccagaaaccactcgccatgcccaagctcataaaccacatcgccgactcaaagccaatcaaaagatcatcaataagcggcagcggatagtgtgagagcttgatgaagccattcaccacgcgatagtcgatgcacatccggatgtcgacgccattcttcttgaggatgatcacgattggagatgcccagggggacgtagaagtctcgatcagcccgttctccagaagcttcttcagaagtttatacaccttagtccacaggtgtggtgcaatggaccttggacgctgggcaacaggtttagcgtcgcctacatccaggtcacaaaccactccacgagcaggtgggggagctgcattgccgtctcccaagaagatcttccgatgatactccagaattcgcctcacttggtcttccatctcgggcgtcgttttcccagggactccaacatctgcctcctcgatcttgcactcaggggtcaagtcacgcatctcaggaagcataaccaactggtcacgcaactgagagagcaactcacttccctcacgtatggagaccgcagaacgtcacccaagtcactcgtatcaacagcaacatctcggagttcaggagggtcttcaggaggcactccttcagtctgagttgcagcgtcttcagcgaagcgcacgtgatgaggcttcggtttcctgagaatcgaggcaagcagtgccatgtcggggccctttgcaggtcgccgcagaatcttcgtaggccactgatactctggggtctcgacacaggatggctcaagcgcagccaggcgttccgcccgaagtctgccctcatgcgactgaacactctccagaataagcgtctgccactcctgatacgcaaacgaaccagggcgcgcaaagcgtccggcacgtgggaagaagccgtactccacaattcgggcgactggcgttctgttgtgaatccagaggtccttgtccgagatgttgaccaccttcacggcgaccggccaggatctcgcagcgtaaatcaggtgcgttacccagtggtcacctcgtcctgcccacacaacctcacgctatgggttcgtcggtccatacgaaatcttcaccaccttggattccccaggggccaggtaccaactacctgtggtttccacgggcatgtcgacacccaggcgatcctctggagtccatccacacatcatgatcgcctcttcatccggaagtgtcacgagaccttcgcgaacactgatcctgactccagctgcaaacatgaaactcatacccagaagcacttcgatcccttcgccgatgttagcaatccagacatccaggagatatatcaccctcgaaccgagagtaatcttcacctgagcactggcaccgatgtacgtgggaacgcctcctatgccagacaccttggtttgcttgtgcgacttgagtgtgagtccgagcttacgcgctaagtcgaagctaacaatattcacagtcgcaccggtatccaggaggactctcgtccggcagtcgttcacagcaccatgcaccatcgccacatcacgtttctttgggtcaggatcattgttttcccaccatccgtagcgctctccagggttcagcttgtactccacaatttcttcagagttcaccgacccagagttcgcttgttcaggatgatgattttcaggggaagtcatgaaatcctgagtcaaagtagtcatgcattgttggttatcttgggttcatgttctcagctccgggccaacatacactagaacacataactctggggccttcttcagcccggcgcgtactgggtccccaccctgcgggcttattggtttgacggcctcccagagttcgcttcgccacccaggagtttatccaggatttggctcggcatgtccttcagtgcaccttggcgggcgagtttcttcacagcttccagtgtcttccagtcttcacacggtttcccgagatgcagtttgccacagttctcgcacggttgcgcgcgacacaagtgagtcggatgacccacttccaggcagcgatcacacttcatgcctttccagccgttttcctctgggtgcccccacttgccgcacgtctcgctgaacttgtcccaattcgggttttcacggcgaggggaacggaatccagagttcgcgttcggtcctggttgggcgttcggtggacgccatcccatgttatccatcacgcgatagacctcgttcgtcagcgtctgagtccactcggcacccttcatactcgccagactcccagcgctaggtgtagaagcttcttctccagagatctcacgagttgaccctgaattcgcgctcgcacttcgggctgaaactctgggttcgtccgtgatttcctggaaacgcgcgtgaatttcagggtcttcgtctgactcagagtcagagacatcgcccctagtcacatactcacgtccttgtcgcttcggcttgaaacgtccctgaggaatgttgtcggcacgaaagtcacgaactctgggtggcggagcatcatggtcgctgcggctccagacatcttcgtcctgttccagagcgtactctagatcagcgctactcctgaatctctggccctgcagcgacgtcttgaggcgcgtgtccctgagtttcgtgatgaacctccggatatgtttctccatgcgcttagaagacttgcgaaagtcaatgtcagccttcccagcggcggaattcagacgataaaagaaatccagggcgctctctgagttcttcatctccatcgtgaagtaacgttcagagtaagacgagcgcgcttagcagtacttcttcctcaatgcagacgccaactccttccagtcacgctgagtgtgtttgggcaactggttgaaccagtcacgcgcagctcccgagagtttcaacttgagttcctgaattcggtttttcgtagaccaacctccctaagccgccatgtttgcaaaacgctcccaccaatgcacgcgttccctgagtgacgccttagtatcgaactcacccagagtattcgagttgatgtacggtctgaacgtcaggagcgtagtgccagcttgagccgtagaggccgtcgtcaggttaaccccagggttcccgtccgaactattatccgaactctcagaggacgagtcatcatcgctggaatcggagcttgggtctgagtccgagggtggattgacatcctgacgcttcttcttcttctgctggtgtttcttggatgccgagcgcttggggtctgctttagagtcctgcgaggccttagaggtcgctgttctcctgggatccgacgtcttccccagagacacaggcccgagcttgacatcctgcgtcaccttggtctccgtagcgccacgtccccgcttgacgcgcgcgattctgccggaagtgtctgcgggagtctgcacgagggtcgctctcagctgggaggcggcgacttcggacgtgttcttcggatcagctgtctcccgtctctggccagtgacacttgcgtttccgttgattacgccactggattcttggggtcgggttgcaactccagggttctgagccactgacgaccccacatttgttgccaaatcaggggcgacggttgcgcgacgcgcttgaacttgggccaatgttgcacgaaggtcgcgcacttggccggcgtggaagcgctggatattctcggaagactcccgctctcgctctttctccgcctcaagttctcggaccttctgctccatagttgacatttgttccttccaagcggcgtaggtctcggaaacccagcgcgcgcgctccgagtcggcttcggcttcgtgctattgccagcgctcggcgtaggcggcatccaggcgctcacgctcaagacgtacagcttcatttgggcgggcccagacctcgcggacacggacgaaactgacccaagaatcctggatccactcgagcggctcgacgcagatgattttctggatttcgtcgagcgtcgagagcgcacctcgctcttagagctctggtgttgactccgctcatcggcgctgacatcccttggaccaccaaatccagcaatcggggcagaaaccctgagtttcggctcggaagtcgtggctgaaatcttggggagaccggccttcctgggtgcgatctctgggtcagagtgcaccgacgatgccatctcaacgtcatcttggtcgactgacacaatacgcgacgggatgactgtccgggtgacctgaaatccaagatcaccggcagctgcaaagccaccggcactctgggccacaagcgctagagctccaactcgttgtccaagcgacatcatcgacgaagacgaaaaactaccataagacgtttgaacgcccgaggcagtactctcatccgaagcgcgcgaggtaccgatgacacttggcaccgcgcctggggtagcgttcttggcttccgcctccagagaatcacgtccattggacatggaattcaggggagtggaattctgaagcgaggcaccagtcgaaaacttgtacgctggaagagaggacagcgatggtgtagacagcgcggatggcgttgacggaacttgtggccgaggcggtccatgctgagtacgcttggatcgtggctcaccatcactcgaccctcgtgggctccgtgaaatcctgagaccagtgactctgaatctcaggacgaactgtcggcccagtagatccgcatcgtagtccgtcatcaatagatcaccatctccatcttccttgtggtagtccagtcttggtgcttgctcttgggcgcttggtgcggcgtgatcttcggagtgtaccttgaaaggcacaccagctatcaccaatcgccactcgaccagttccacagcgatgaaattctgggtttcctccatgacagagcgcaccagactttctggaatcctggaagcacgcgtcgaagaccagccagggatcaaattgacaaactcaaatccggcttcgaagaacagagtctgcagaatggcgacgcaatcgcgggtggtcatgatactctggggaatagtagtcgccatgaggtcctgaacagttccgacgccccaccgggcgaggtgaaactcagagatccaggcttcgtcttgattctccagagacaaacgccacttgaggtagtctcccgttgcatacgcggccgcgaagtatgagttggcatccagtttcggagccggccactcataaacgacacttggcggcgtcaccttaccaggattcacctcttcccagcgtcgaacttcacgtcgaacgtacagcaccatgctctcggcgtccaacgctgctgctcccgattccggagcaggcgcagcaacttcccggttgtcgctttcaggcgtcttcctgggtgccgcttgcaaacttggcgctgaaactctgggttcaggtggtgcgaacccagaattcaccttggaactctgagtcttcacctcctccttcgctcgcacgggctccgacttcacttccacaacagactcgtccgaagatgagaccaagtcaatcacctccggcggctcaaccgcattggcgccctcagacgcctgagcaccaccctcgcgggcgtgctcctctgggacttcaggaatccgcgacccagaattcacctctgtcgaaccttggaacccaggggaaacttcttcctcctgagtttgcgatccagcagcaggctgaccttgaactgcagacgcctcgatgtccccaccttgcactgcctcgctctcgcgagtagccttcttcgccttccgagcgtcgcggacgactgtttccaggtccttgtgctcctccggctctgtaccttgaacacgacgcgactgacgtgacgcctcaccgcgtcctccgtcaccacgtccactcttcttcgcccctcgtcctccaggcatcttggtagcttgaagttgacgggcactcaacacttcttcaacacttgattccgatgaaatcctcgacaatcgaatccgggcacgcgcaccggctgaggcgaggccgatgaaacctttgtcgcccaggggggggggtcgtatagcgcagggcaagactgttccccaggggtagacccagagaatcgacttgagagtcaacagcaagaagatagactcagagattcgcagccgcaaagctttaaaccctgagaatcacactccttggttggcgtgggtaccttgtgtaatccctgtccgctcgtttgtcttcgacggaacggcactccaccggttgaaaatgtagcctcgaagaagtgcgggagcgcacgtctacttcagaacgcacctccacaccaaaaggcaaagccagagaatcagatcccctgaaacccagaatatcacgaattcagggtccaggatttcagtcaactctgggacttggaactcagaagacatcttacccaaatgccctcctagctcgataaaaccaacaaatacagagtatacaaacactacaactagccgtcacttattcttttggacccttggacggtgggtcacacacacactaggctcactcgagtctgaaattcgggacctagctcccctgagactcacacaaacgcgcaccacctccaataaaggaggaaaatacaatcactatcagttacctttcccttcacacaagcagtcaatacaaaatcctggaggcgactacctagcaccccagaataccctctggaataatatgaaatgggctaccacgagcacagcaagtgacccaactaggatatggaatagatggatcaccccaggaagctcaaggccgtcgctggtcaccacctaactggacttgagttttgatggagcccacacagacggctgtccttcgccgttgatgtgccgcggtcgtagtctcgggtcctccggatttccgtcggcaggcttagccgaagtcacttgcgcagtacagggtaaaagaaactctgtttggtttttatcagctacttctctctctctctctcttcttcgggcaaatagcttctgttcactatgcttgggatcaaaatgtcttgtcttgagtataccttgggatcagcggtccaaacttgcgatcggcttgcgaatccattgtcgcacggcgtcgaaagtgccaatagtgggtccttagacttggtttagtatggtgcaggactccctctcgactcctcgaaagtatccagtctgtgcatccatgacggttcttcaaggtcacgcatcattttgattgcagactggcttcgaactgactcgaatccctgaaaaccaagtgacactcagggtcatcttctgaaatcctgggaattctgaggaatcatggggaactgtggggattcttgggtgttggctcgggaaacacttaagttcagtatagagagtctggatttatggtccaaacccagagaatcatctttggaactctgggtcacctgtactcagggaggtgaactctgggtcatcgtgcggcactctgggtttccgtgcagcactctgggtaacaagtctgctacattgcaggcctgcgtgcatctccacaaagccacacttttagcgggtttagcggcctcctgcgcatgatcacggtggtagtgggttgattctcagggtaatttgatcctctggggcactctgagccactgcaagatgaggtgtactctgggatacattctccagagacactttccgctagactttaggcactcatcgtaagggaaagtccgcggctggactgagtgttctctgaaattctgggcgtgcactcccaggattcacacttccagccggttgggcccatctgcggtcagacgctggattcatcccgagaaatcacttctctcccacagtcgccatccatgtcacacgggtacagccgcgccgtatccaagtcatccaccaatcagcatccgatacaaactccaggtcacagaggtgacggcacatcgtcggcaattttctggggaccgcctcgtgtcaatgccgtggggcgcggtaacatcaagcacatatatatattgcaatcaatcacgtttacacatgcaacataaaacgcgatttgggtacataaagccgtataataagtgcataaaataaactataacaccaggatttgggggcaatgtgtaacctcggcacttacaacagcattgtagctccgcttcacggcctttgacgccgaaactttgttaaacttctaatgcaacctatatgaacacttgagccaattttgagaatgatagcattactccttcaagccccctccgtaacgaccatgcggtctgttaggggtcattacgtgttacgtagtccccctcaccagcatgcaggtaaagaactggcaatacaaaaatagtaaactggcagtacaaaactagatacgtgcctggttgacctattagtactgaaagtgagggagcttaaacaaatgtaataatattctgttactatttgtaaattacgttacttgatacttgttatacaactttaatttcaccatgcctcttgtggccatatccgattattagccgccctgcacagtttagcccctccccctccctctcaacgacgataactttagcgggggcaaaatagaatagtgttcctagattattgtatgccgaaatgatgcgccaaccgcgatatgaacgtttgaaacctcgatgatttctataccttacatacgtttttacaatataatcgtgatgcactcatcgacgcagtcgacgaagcctttcagtatattcttgactattagcaaaaaaaaattgttaaactcctgtaagcaatgagatcagtggttaacaaatgaaaagagcagcgactacaagctacctcataccagtaagaaacactactgcagcactacagaacttggtcgtgctgtccaacaagcagttggacacggccttgaagtgctctcccatatacctaccaagtaaaatgatgagtaaacaccattctgtttctgaaacagctgagttaagtcgtggtaggagtccaaacagttccgtgttattcagctggtcgaccacgcaccgccgtgtggtttctactgtgcgcatgtgcacaggtctacccgatgagcagcaaacctacgcaagtgaagatgctgtcacaaatacgccccagcttttcctggttgttctctccctccagtatacatatgcacataaagaagagaatggtctattgtcgctttagttctaagtggccctcgtcgaactcttactttacgagggtcacgcccttgcccccccccctcccccgctgtccttgagcaatttcaaggcgagaagaacttgatttttttcatttccgcctccctttggtcagtgtccttaccatttttcgtagaaagagggcaccggcaccgaaaagagtaacaccacgttcgatctcgcccaaagtaaaaacactaattatcagaaacaaacccaataaagaaattgccacttgcgtgtaacgaagtagtatatttatacgacctgaatgttgtgtcaaatatttggcccacgtagcttctgcgtagaaacgtcttgtgcgttgcattgcaacccgcacaagacatataggggggtaagtctattcggcggctcaaaaacacgggagcgagtcggtccagcggctcagaaatagggtgttaagtgcgatggcttcccaaaatctgggagggggggctagcttgtacgtaggaccacccctggtttgcaatggttctggtgaagcgagacggatataactgtcatcgttcgcgggatcttaggacagaataaatgctattttctatgttttggtcgccgtcggctatacaagttccgcttcttccaggagcgagacacgttcaatcacagccagtcgcgcggtacgtagagtgacttgtagtggtgcgccagcacccccagcgactgagtagattttcccaggcattggctttcccaggcacgtggtcaataacgtatttaaaagccataagcaacattggagcttgttcgctcggtagcgggccatggccctatccgcggtgaatggactaaacatatagtccaaattgcgatggcccgtatacagccggaatccttttgggcgaagcagtagatagtcatgccggcgcgtcaccttgacaatcgcaaacgcttctttcttaatcatcggccacaggcttggaatgccggcaaagcgacagctcagaaacgccaacggccggtgcttctgctctcccaacgggagcgccagcccgcctggttccagctgcgtgagaatcgcgccccagtgatcttggcttgcgtcggtgtagagtaccaacaccgctctcgtttttggatgcgcaaggggtaccacctggggcaaacagccgcaaatcgcctccaggctgctaacttcggcttctccccatccaatcgcttcaagccgaactcgagacggcttgagcttcttcctggagccggcgcgctgggcggcacgttccagcgtgtcgtagagcttcgccgcaatgcgggtgaattgggaatgctctggcgcatccagttcaccgagcacaggaagtgctgcagcagcatgtcaaccagtcgttgggttcgatccggacagtgtcttacttcgtcgcctgaaatcatcctgccacaccacgtcatatccttggagaagaactgatacttttttgcgtgaagctttaggccaaactccttgcagcattcgagcgctgtattcagcatgattagcatatttttcagtacgacctgaagacggcttttctgtatggtgatcttgatgagtccattgcagttgaccaggtaatgggatccggcagttggtgacgattcctggtccctcggacgacgccatggttgctggatggaggtgggaccagggcagttgaagttggatcaggtacaagtggtgtggtgcacacaggtccggtcacctacattaggacttcccagattaggtatggatccgtaccagtttattggcacagtggctatgttgggataattaggcaggatggcgagtcagtagtggataggatccaagccggatgggaaggctgggtacaggctaacttaaatcagagtcgaatgtgcttgggaaccacacacttgggccttagttttgggattaatattgcaccatactttaatcaagtgatttgccccccgcacacgtggcagactactggatagcttgtccagcagctcgcgcccttcggtcttcgcccccccctccccaactcctccgctaataggaggcggcaagcaacgtaaaggaaacggatacaacaccaccaacaaggcaacaactccggatctggtatattacttgtcgggtccacaagatctacggccaagaccaaggatcagcctaccttgatccgagtgaaggatcccccactgcggatctaacccaacatttccccaagcccccgacaaggccgttcaagctcactctctgcgtgtctcgtgctaacgagagaggcaatccagcccgtcgaggtgagtcagcaacctacggttatcggagtaccccctccgttagtcggtgtctgagcgcagtgtgtgagtgctaattcccgcggtaaaatcgaaagaaaacagatgcaaaaatcagaattgaaaaagatctcgccgtttttttcgcaatggacggaaaactgacttcgggtcgggtcaaaataatagccgcaccccgtaagctatcggttagattggtaacaaacttttggaaagccgtttcaagcataataaatgaactaactcgattaaatagctacaataacgtctattaaggtgctcaaaaaggttgaaactgccgcgattgacaagattcaacggagacacgtacatcttgattttgtataaggagacgacgaaccatccgcaagccagcggttaccgctacggagcaggcgtacgcgacggcgagggaggaccatgctggacccccccccccccacagcatgaggtgaatgatgagacgcccgacactctgccgccgaaaaacacgacatgatgatggggaaagtggatgtgacggtgccggccttggtggccgaggacatgaagagccgctgccagctcgacgttcggcaccataagcggatgtagtgtcagcgcttggcagaaaataagagcatcgaggcgaagctcgcatgaacggggaatgcctcatgcgcgatctggagcagacctagaggaggaggagaagtactaaaaggtgaaaattcgtcgataagtgatcaaacccgtctaaccatatgtgtattgaagaagtcttgcgaagccccacgctctgataggaatatattcgcactcaggtaactagctgagctggtagaatggttagttaccgactacgtagaggccggattgaatctcattgccgggttgaggtttcgcgctaacttgtgtatccgtgcatgtagcggtattggggtttcttcctttccgtaggtgctgaaacggtaaagtttgagctcgaggcataccattaatcttttggctcaatggtggcaatgtgtcatagatgtcggccactgcaatattaccacgtctttctgggaagccacaagggcgacaatacggagaagtcccagtcatttctccgcgatttagagtccgcgtttgcgcttgggtttgtcagccaccggagctgaatgttaggtgttaccagcctcttggtagggaagggggttgtccggcattatctcactgagtaacggtaccctaaaatttactgactcgaaggcttccctgttgttcaccacagtataacacggtctgagcagcgaaaatgccgaacgttttggctcgttggtagttcttttgaaaaaaagcaattgtatgacgacagggatgctctcgcacgagcatcgagattgacaacgtgagtacgactaattgtttttaacaaacttgtcgtgacgtcatccgattgttgcggatcacaaaaaaaacggaacacccgatgcatcagccggtctgactgtacacgatgacgatcgttccagctctttgtcgaataaatcttgccctttgcgagtgacgttactattgaactcatttcgcaacttcagtaattcctgctttgccaccacagtagcgacacttacaaaataaaactgttgccatgaaaactctgttgtactcaaaagtaggccactgttatttccttctacagcacttggtacctcgaatcccgtaaaaagacaccggatcagcgtaactttacaaaactttaagttcactttgtagccaaaagataccatgtgtagctgagcttctcgttgcttacgacgacctaagaagagtggaagcccactcatggaaatcctagatgcaatgtcgtttgcgaaaacccaactaaaacaatcatcactctcagaagttcactgcaagtagtagcacttttacttttccatctccatctcatccaatcatagtcaatcaaaggtgtaatgagcccttttcatatgagctctatcggtctgagttacaggtagacaaaagtgtttcttaacgagaggcccaatagcaataaacagacgacagaatcgtccgtcgatatccaactggcaacacactctcgagtcgcgattttgatctgcaaaagtggttaaaaacccgggtaggcgtctgtagccatgtcctttcctcacgttttttaatcgctgcagtatttaccgatacaatgtcgcttgccgtctgtccatgtcaatgttatcgatatttttttagcgcttcgcgacccacttaagtgatgcgctgtggccctcatcaaaagcaccctcgaacccaaccatatcgatcagatcactacccgaaggcttagcgacagataagcacaacgcattgtgctagtagattattttttggggtaggatacgggtaaggtatggactggaggtctggcctttgtgtgctcgcctacgcgaggggtcagcgttgtgggtctgaatgtgtgcatgtgcgaagtcaaaccgaaatgttactctgcggtccactggacaaatcacgccgatctcttcctcttgaaagcgggcgatggcatcttgaagtaagtctgctgctggctgcggcggggatattcaacccagctcacgaagtcgtagtcggggccacagacatcagtttgttttcatatataaactttaaagtatacgcatttgacccttcaatgccagagctatcactctccgaagaattcgagtcacttgcaacttcacgcgcatgggcactcggcgctcccggctcttttagctaaagctggtcggcgggctggttcctgagtgcggaaagcgattgagcgcattgagtcggctagcttgccaatatgtgcgaggcgcttgttattcttgggcatcacggttggagagtgacaaggatgacctatggaaaacaagcgcctagcaatttaaattttatgttgaagtgtactgcctcaaacattatagcattgttgctataaattgtaaccaaaacaactatgactgtattacgatgcaattggttccaacaataaaccaccgtaccatatcctaaagttgattttgcgacatttcctgttaaaaaaaggtaaaatggcgaatatacatgtaatagggcccaccccgacactagataaatcgtatcttcgtcgtcaatatttacatgctgacgctcgggaaacctgcatcatgaaggtgaatagtaaatgtatgattcgttttggccctcgagtttagtcccttgttcgcaattaatttattatatatccagaaaaatgggcatataagagcgcaatctcgttatccgcttgcgttctaatgggcttcttcacgaaggttacgtagctggtgccttcgggtgtctaacggatacatggtctatccgtttcaaagcattcatctgtttgaaaaacgcgtgcctatcgggtgctgtgcgggcacagaaccatatgtttgttggccggcaaatcggcaaatgacttgatgtttgtattggtcgcttggacaggggccccaaaaccgacccgattcgtcaaatttggtcgaaattcacaatactataaatcgccgatgaatccaggactaagtcaacatgtatgtaccatcaggctttatacacgttttcaacttgaaaatggcaaattcaaagtttcatacgtaaaatgtaaaatcaaaacgacacaaaaaacgaaaggaccgacgccacagtttatattgcgtcacgtactggatcacagacatgtcctccaagtggattgccgttgcatggaacttgttggtacgcagcgcgcaactgtggcaaagatgtgagatgactgtagtctgcaaaggtgctcaaccgctggtgcgttgcattccgttgacagaagcacccatgctactgtcgttgctactgcttgcagtctgagcaacgccacggctgctgtcatctacattctgatcaacgccatgctggcgttgcatgttgcgctgcgttgtcagcgcttgcatacgagcacccagtacggcacggacgcgtggtggatgcggtacggttgaagctcatgatcgttctctaggagccatcagcgtgcggctcatccagcacaagaactaacagctaatacactagattgaggagtgaaggaggagtgtattcattccaatatttaccgcctgtagcgcaggtctcctcctccatttctaaatctctgcctaggcattctgctgaagctgttccggcaaggaagtcaacgctttgcatatcttattttcaagtatttgaagtataggggtaacaaagaagaaaataaaggatttcgcggtatgcgcaggtcttttttatacttctgttgacgtttaaacgtatcattatcctaaacgaagtcttttttttcttagcgccactaatcgggcaagttcaatcggtttgttcggccagaacagaggctaaacgcggtactattcctacatccgtacgaacctgaacgaacgctaggcgcgttcaaaagcttggcccactcaatccgatcgaacgaatcatgagctatagaggacggatatattgatgaaataaacttatgtgtctgtaaacaaagactgtaaagcgcactaacatgtagaaggctaaccctgctatacgacgtcataagcatagaacgtaagtgaagcaatcgtggtaccgttcaaatctttacgggcaacggcggacctgcgaagtcctgttacttagtgggacagtgaaataaacatcgacgtggttcttcacagttttttttgtttggttatactcaatatgaatctgtatcgatcagaaggttatagacctgaaactgtggatccgacgaatcatgagcaccggtttggcgcggaaagcacaatcactggttttaaaaaatgatttttcgagtgtggctataatttcggcgcgcgttcaaaccaatgtggggaaaatgactaaaccggtatgaaatcgcattttaaatgctgaatcggtatgaccccccaatcacgcataccggtcgggtcactgggtggtcgacacccgaactaaacacctagttgtgagcttgtctattgtggactacttgcttgttttcatcatatctttacctgagagcaagtgcaccttctccgatgcttcagtttttcttagtatatggtcatccaatctgccaacccgttatgatcgatcacatgacagcgacgccatatatcctgaagtgtctaagacgtttaaaaccctagcaaacttcttaaagctgtgtccagcgttcctccgcccgaccgagcatcaatttggtggcggcatgccaggttagataagcacgaaaaatagttcgtactcataccacaagtacagcaaccatgccaggaatgttatgacacttgtctgggagtctgcaagaagcgaaggcgtccgtggcgtggtcaatatttaaaattaacgcataccgattcagtcacgaaatatacggatttggcatttaaaattgatttcagagcatctccaccggtcgtgagtaaaactaaattttaccccttttctgtcaatatttaattatagttttagttttgtatagctccaccggtttgagtaaatgctgagcaaattcctccattttttacgcagatcaaatttttgcacaagtttgcctacgggggaggctttgagtaaaaggttgaagaaatgtcgaccagccagtagtagggcctagtcgagcgctctaagcagcgcaagcgtcacagaccgcagtgttggaatgcatattgcaggccagcttcaactgcagcaagttgaaggatgagcctgggacctggactggtggtaagacatgcagcagtaggggtttccagagaaccaggtcccagtatgagaaaggggcaaaggcccgtaggagctggcagcagctccaccgctaatctatttacctttccttttgtcttctttcgtgaagagcgttcggccgtcggatttggtacaacgtccaacagggttctgagcccaaaccagcggacttgctactgcacaggaagcgatccaggatggcggaccagctgaagttcacgtcggagggtgtgcccaagaactggaagggcaaggactggcaggcatccaagtttgcgatgcagatggcgtttcgtgaggcggagctcatggagattgtcgatgggacgatcagcaaggagacgctgtcggatgcggagagtgaggagaagttcgacaagaaacagaccaagatcatgtgcttgattgggatgtcggtgccgtcggagatcttgcaccagattaggtacaagatgacaggcacggagatgtgggaggccttatgtgacctgtttgagaacaaggtgaataaaactgttaaggctcacactattcgtcgccttcgtgatgaactctggactgtgaagttttcgccaggtggaaatatgaacctgcacttgagcaagatgttcaatatccggactgagttacagacattgcagtatgcagttgatgatattgacatggttgagatgatgctggagagcttgccggcccaagcagagttcgagagcctgaagtcgtcaattcgctacagtgtagacactactatgttcacacctaccaaggtccgcgagttgattcgtgctgccgctgcccgccaagtcgagttccgtggcaagggccagcgtggaggacctcgtgtagggagtaatggtggggctagtggagtgaatgggacgaagagcagagctgataatcagcatgaggagaaaagcagcgactccaagaagaagaaattgaagaagtgcttcatctgtgggagtactgcacatctcagagctgcttgcccagataggactgacaagtcaagtggtgatggcgctaatgcaactgagcagaagcgtaagccacgaggaaatgtgactattcgacaggaggtccgcgaatctccgagcccagatagtgacaacggtggctctagcgtggagatggccgcgctggaccagatgatacttgacgctggggtcgaggtggacatacgggatccagaacccgagagtcctggtgatgtagatgctcaggaagcgaacagtgctgaagctgacgatgcagttggagactccaatggatggtggttcttcgacactgcggcaaatgcgcacgtcacaggaaacctgttggacttcgtagcatttacggaggataccagtcagtcacagagcgtgcacggagtggcacctgctcttgcatcgcggattgcaggagtaggaactgtagctttgatgactgaagtggatggtgaacgtggagtagtttacctgaatgatgtcgtttacgttcccggtgctgagcacggactcttttcacctggacttccgcggagcaaggattcgactttgactatgagcatgatacactgaatttccgcatcaagtatgaaggtcgggctgttatcgtggcttcgccgtacgaggcaacgtggggattctttgtgacccatcctgtgaatgaggggctagagctgcctcgagacagaacaatgtgtaactttactgcgattgatggggttgcttcacttgcgctctggcacgagcgacttggacacatctgcccacagtacttgaagaccatggcggacaagggtctggtgaaaggactgatgttgacgaggcgcgagcaacaagacccttgtgacgcatgtaatttagggaagcagaagaagacaccacacaccaagaagctgaaccgtgggctgaaaccgcctaatcaggcagtgtatgtggacttgctaatcccaagtcagggaatggcactcactttgaggcggtgctggtgattatggatggctactcccggtttgtgaccgtgcacatgttaaacagcaagtcgagcaaggtcatcaaccagcatattaaggagtacatcttgtgggctgagcgtcaagccgggaggagcaaggatggtgcggagcgtgtgaagtacagagttcgccaagtctggacagacaaaggcggtgagtttatgaactccaccataaagaaatggtaccgcgctcatggcatcgagcacatacgtgtcggacccaagagctcccaactaaatttgtgtgagcgaacccatcagtcactcgtttggatgatgaaggcgatgatgctggactctgggtttcccacgagcttgtggcccgaggctctgagaaatgctgtctacctgaagaaccgagtgttcaacaaggggcacggtggtgttacgtacgaaaagatgtttggagtcaagccagacgtccaccacatccgcaaatttggggcgctcgcttacgtccatgttcccgttactcctgggcggcgcaagttcagtgacaacgctaaagtcgggttcctgctcggttatgcggaggatgttgtggggtgtaaagtatacttccctgaagagcatacagccaaatttgttgcggatttgcgagttgcggaagatgttgtttaccgcgatcgttacgagctggtcgaagatgcagatatggaatcgctgcactttgagcatgtgcctgcagctgatcgagacgcagacaccggagcggatgagactgttgttagtggcgaaatggagagcacagtgatggcgtgaatggaacacggagttgaacaactggttcttggcgcatggctacctccgctctctcactgaaccttgcctgtaccacaagttcggaacagactcgatcatgctcgtgcttgtctacgttgatgatattatagttgcgaccaacaatgaagaagacaagtgcaagctgcttgaggagctgaatgtggcgtacggcattaaggaccaggggcttctcaaggaatacctgggcattgaggtggaccagactgatgagggcatcaccattcgccagagcaagtatgctcgagaggtattgcagacatttgggtacgagaacgcccatgcagtgggcaacccgatggagacaaatgttcggctggcgcctttggatgcgagtgaggagtctgacactagctttgactatcgaaaggccgtcgggatgttgatgtacttggctacgggaacgagacccgacctggcgtttgcagtggggcaacttagtcggttcgtggccaagccatctgccagacacgtggggacactgaagcgtgttctgcggtaccttgctggtacggtagactatggcatatcgtatgaacgacctacggaggtgccaagcgctattgtattggaaggcttttgtgatagtgactgggccaatgaccctgagtcacgtaagagtactaccgggttcgtgttctcgctagcaggcggagctgtgtcttggatgtcacgtcgccaatcgatcgtggccctctcaactgctgaggccgagtatgtggccgcgtgtgaggctgcgatggaggcagttgcagccagcaacatgttgcaggaggtactaccacagcgaagtgtgaagctaaagatcgggattgacaaccaagcggcccatgtgctggcgaccaaccctacctacagtcgccgtacccgacacatcgagctgcgatggcacttcgtgcgtgaacaagtgcagaagggcgcaattaacctacgcaaggtgaaaggtgccgagaacccggcggatgcgtttacgaagccactggacacgcagcgactgaaggacctgttgtggctcgtgggcgtgactggtggcatgtgatgaagcaacctgcctcaagaagcgcattctggtggtcgaagtttgtacttcgagggaggcgtattgcaggccagcttcaactgcagcaagttgaaggatgagcctgggacctggactggtggtaagacatgcagcagtaggggtttccagagaaccaggtccctgtatgagaaaggggcaaaggcccgtaggagctggcagcagctccaccgctaatctatttacctttccttttgccttatttcgtgaagagcgttcggccgtcggatctggtacaacgtccaacacgcagtgtcgcccatgctacgtcatccctgggtcttcgtcaacgtgttcccgggcccgttttcatctttatagggctatacagctaagactcgccgtcgccattgctggcgccgtgctaagagctttaacgcgctcgctgcaagtctcaatgaccggtggagctgcgcactgtctttagcacggttgtgccgttgtagacacgggtctgaaggcaatttgcttttactgtagttttactcagcaccggtggagatgctctcatacggtttggggcttcgtgatgtcggcttacaaaatgctccaccgaacctacactttacgcacagaattgctgctgtcaccagacagcgtcccgtagacaagaaacaagatccccataaatgctggttctacggtactagaaatacaatacaaacaccaagtaaaaagagttaaagcctaatctccatcttgccagcatgaccaagctgtgcgacctgctgggctcgcgcccggaagcgctgttcgagtgcatgtacaccaagcacaagacgcagaagcgcaagatctggcatgatgggttcgtggcgctccacgcctcgcggaggatcgttttgtacgaagaagacgagggaaaggctggcaaagccatcgacgaggccaaactggccccgttcgactggggccgcaaggacgaggagaacttcgagacgtccaagtatgtgcagataggccgatctccacctctccgtctgtacctaaatggcttcagctgttaacctcactaggctggctgctgttgctacagattcctagttgaggtcgtcaacgagacgcccacgccgtcaacccacgccgcatcagcggccacagcaagtgccagcggcttcgagtctgccagtacagtgcagcagtctgcagccaatggaccaggagcacgagcggggcctcctcccggactcggtggacgcccacgcttctccaattccaagttccgcacgccactgagtcgaggaccgccacgtcttggcagacctggagccagccgtgcagctcacccatacagtcgcaactcgcccgtaaacgtaccgactccgccaacagcagcttccagccccaagttcgacttcgaccgcagcccgacgtccgagtggaaatacgtcccggacgtcgtcgctcgcactcgtacgttctccccgccagcgcatctgtatcagaggcattatgcttgctaattgctgtctcctgtgatcatgatgaccattgcaaacagccgacgaggtgctcgccctgctggacaagtgaacgtgcgtaatctcagctcgaatagcttcaactgggcaataacgaagaaccctgagcgatgtatgctgcattaatttatcccagagctaaccacgctgctaggtagcccagccatcaaccagtgtagccgtgagacctactagtacttgcctaaatggctgcgtcgtccgcctgcttggggtccgccacgcgcacgttttcccaagagtccgatgtacccatcagcacgttcgagtacatgttgcggtcgtcctgctggatctcgacgtagccttttctgcgcgtgtagtcgcgcaacagcttcatgagcgctgtgccgaacagcagcgctacgacgcacgcacacacgtcgtacacaatgttcagtgtgtctgagtagttgccgctctccgcagtcgcgtctggcgtcgaaacagtagccatctgcatcgccgtccggaggagtctctgccgtcgcatggcggatatgcgtcaacgctcctggggtagctgggagagcttcgtcagggtgctgcacgtcgatggatcgagcgctggaacgtagcgtaaggcttagctcttcgggcaaaatgatcgttgtcgtttccgaatgttggcagccaaatgcaacagtcatttacaagatggctacatgaccaaggagctcgcgctctgctcacggtgttttcattccgttcaatgatgttacatgggctctctggcttcgagagcccggagaaaacgactcgacttactactgaactaactgggcttcgtgctgagggacatacctcgctatctctgctttcatacgcttttgcctgggggttcctgctgtttattcgtcgtagatgacgaacgtggagttgctgatgtcgccgcgacgcgagggctggccgagttcgccgcgtcggatctcgtccgggttgttcctcgagtgcaggatgcagctcagacagaccttgacgcgcgtggtctcggcgtccaccagcacgggcatcttacggcagcagcgcccgcagctattctcgccgcagagtcggcagctgtggcgcttgcgcaggaaggagaaggcgtgctgacacacgttgcagttccgttgctgcttgtccttatctccgctcgtgaacgaccggtgcttccggttcatctccctcgtctccgtcacgaggtggttgccaatgctcgtcttctcggcgtgggcgcgcaggttggcaagccgcacgcctgcctgttccagccagtgtgacctcctgctggacgagcacttgctcttcgggtccaggtgcgacgcgaacgtcacctcgacgactccgggtgtgttggtctcctgcactgtgtacacctcgcagcggatggacgctcgaacgtacttgggggacggccgcagctcgggcacgcggatggattcgaggatgcggtagccgatcaacttgccgtcgtccgtggtgctcacgtccgtgtagtccaggtacacgaggtccagcggcgtcgtgccgaacgggttcttcatcgcctggtacttgaggccgcagtggaagtatcgcgagttggtgggctgcgcgcaggacgcaagcactttcgcctcgataacctgatcagcgccgaggatgatcttctgagactcggcgaaccgctcggtggtgtctcccgccgccaggatggacatgacgttcttgaccgacgcgttcacctgcgtgataccgcgcacctcgcagcgcgagcgcttggacttgaacaggtgcacgccgttcttgaccttggccggttcccagttggagcctactaagtcgctgtcctcgatgttgctgggctctctgatgtcgtccgtggcgtcgttggatgcaaaggccagcgcgatgctatgcctccgcttgatgtagctgaagcacccgaccttctgcgcagcgctgagcagcgtcgagtcctcggagttcacgcgcacctgtcgcccgccgacggtatctcgaccgtccgacgatgctgccgacctgcaccgaacgcgctccatggagcggacccccgcgggcaggtagcggtcctgcacgacgtcgtcgccttcgtcctcgtcgctgtcgctgtcctcgagcacgcgctcgcccttctggttgcccagcacgccgccgaagatgggcgtggcgccgaggcgctgctgcagtcctgaccagagctcctggcgcttggagcccacgtgtcggtggatatcggagccgctcgtgcggtgcatcacctcgctggccatggtctgtgtgtgtctgttgctgatagcgggtctgtcttgaagtgcgacaagttcagacgctggatctggcggttggcggcgtcactagtcgcggcacgagaagctcaacgggcgctccgactcctagcgctgactacacggcaaattcaatggaaggaagctgcgcgctgccgcccgagcaatttgagttgtgaagggctgcagcctgcagtgcagggctccagactcgagcaaggtgctcgaacgtggtggtcgatcgtttcgcatgtcgcggacagccatgtggctttgccggcctcgctgggctgctggcttgaaggatcgggcacgggcggtcacgtgctgcgttgcggccggctggtgttccatcgcggcccgggctctgctgcgcctgacaacggccagctgggcctcgccgagccttggctctcgcagcaacttgcctctttcgcgcggagcgacgacggacagagaatggcggctcaactcgcggcggccccgccgaaattccgcccccgtggacgaacgcaagcgtgtgaagtcttcaacttgtgaaggcggctaacgagacttgctgctacagtaccagcacgactcagcgatgaagcgttttattggcaatactgctgcgaatacgacgccttcgccattgcggcggtgcaagttatcctcggatacatggtccgaagctgtggggcagggtggcgtagcccggtcgctcaaagtttcaagttggtgtgtcctcggcgcgcctgcgcctcgctcgccctccgtctcgatggcgccgatcatgggcttgttcatgggctcgccccgccactgaacgccataccctcacgatcgcaggaactgtcgattgcgtccatagcccccgagattttttttcacttgcaatgcaaagccatacgaaacttcatcgagccaaacggaaccaaacaaaggaatggcaatggctgccatatacatgtatgtgcatgtacttccggcgcctcatgtctcgttgatgatcacgatagtcgtgcgctcgtaattcaccaagtgcagcttggcgccatacggctccttctgaagcaggcggtgaactagcgtaatttacgctgcagcacacacgcgcttcaaggggcgactcggtccatcgggcatttgagaccaaccaaaatggcatgcgcgtttactgcgacaatgtcacggaactaaactgttccgtgaaggtaagtttgtagaagaaagcaacggacgaccctaaaggcaaagatcgtgaagccactcgagccgagatctcgaaaccactcgagaagatctcgcgaccctcggcagtaggtagagctagcgagcccccacaatacacactttgatattttccctctattgcacaagtcctgccaacaacgtctacaagctcagtatcgcctggcggagtccctgtcaaagtcctccgtccgtatccttctcctacgcttcctccgaccgcaacgtggtgcccctaaacgaagtcctgtctggacgggggttcaccatatttgcaacagacaactttccactcgatggatccaaccagactttagggcctaaagtcgaccctagagagtttaggcgaaagcaacaacaacaaccagtataatacgtcgtttgctcgaaggcctagtttacaacaaagtactgtacacacagaagcagccacaagaacgcaggactccatgttcgcgtgactttgacttctcacttcacggctttcgcggctcttacaacgacggcgcactcatcgtcgctgttccgttctgaggacgctccactcgtggactcagtcgtggcagaaaaggctgtgcaaccactcgacgaacacgatggcgcggtacactgaacagtgcgtgagctggtacatggacctcaccgctgttgctgaggaagacgcacccttccgtcggaatccgtcttgagcaacatgctcgaagtggtggcgtttgggccgcacgttttgttggacggcgccggtggtcccccgggttcaggggtctgctgtattgtgtcacacaatacaatttgtgtgagcgcaggaaacacgtcaccctagcgttatagttgcaaccggggcaagcacttcccgcacacaaaggcaaaaacggacggcgtggagtcttcgttttcaataaattcaacgacatacagcggcacgctgcccgcgacacggttggttgggcctagcctagcggttactcgtcgtcctcctcgtcgtcctcctcgccctcctcctcgaaggtgtcgagcggcaccgagaagagacgcatgatgggcttgttcgggtccttcatgatcacgtacttgccctcgggctgctcaagcagcagctcggacagcattttgatgatgccccacgtgttgttctggttgagcgcgatctgcgtcgcgaacgtgttggggttgtacgactgcatgcccagcaccacgtgcgagtacgggtccttgaagttcgagcgcgacacgtagcccaccttcatctcgtccacgccggccagcagcgcctgcgcagtccacttggccagcttgtgcgagttgttcttgagctcgttcgccagaatggcaccacgctgcaatagtaaacaaaatagcagaaaagttagtgatactgttgacgacaaagcatcgtagggaaacatgcaggcatgtggagaatatcatcgtagtggtggtgtgtaagtctctcctagcaataagctctcctcaccatgagtataggaatagcgtatatataaagttgtgggcattcatcgagacccgcacaccatcacaaacaatacaaatacaaacatgcagaggcgcgagatctggtccatggtagaatcctctcatccttttcaagcttcctcaccaacacagtaggattagcgattctgaaaaatgttgtcaatcaccgagtttccgagcaccaaacccacgcgccccatatatacagagctgcaagttactctcatccttttcacttgtcctcaacaatagtgtaggcttagcgattctgaaaaatgaatcaatcaccgagtactcgcagctctcccgacatacatgtatacacatacactcgtgcagtagtggactttcatcacatcactttctcctcatcaagagtgtaggaatagcgtatatagaatatgcaatcatcaagtccaacaacccaccggcacatcctcacgcagacatacagacatagagatatccatccacacacacagttcggcacgaagccacaacgcacctgcgagtcgatcttcttgcgccactcgatggagcccgggaatttggggtcgtactcgttgagcgcgaacgtcgacacgtactgctgcgtgcccttcttgagggacacaccctgcacctcacagcgggccacgaggttaagaccgccgcccaggtcgaacttgcggtagcggtaggcgccgctggcaggcttcgagtcgtcgccagcgaaggggttggcgtcgtcgaacttcttgtagaaggcgcccttgccgctcttgagcacttgctgcgacaggttctggttgatcatggtggcctcgaggctgaggcggtccgggtggttcatgtgctccgggtcctcctggttgggcggctcggacgcgttctcgttgaccgtgagcaggtcgaagttggactcgtcgcgcttgtcgaagaacaccatgttgttgacgcgctgcgccacgatgtcccacgggtacacggagcgcgtgcacgacatgaggtgcgacaggatggcgtccgtggcgaacacagtggcctcgccctgctgggccagctcctcgatgaccgggtcgtccgtcgtcgtgacgtagtagaagtcgcgatcgtcgtagcggtgcacgcgcgtgttggagcggctcgtgacgcggtcgaaaccggcgtcgtactcgcgcagctcgccgcaccacttgaggtcatcgctcttggggatgttggcctgcagcttggtgagctgctgcatctcgaactggtcgatgaggtcccagctgctctgcaccatgaccgacgccacgcggtcgacgtgcacctcgtcgcggcggccgcggaagttgagcgcgcggcgcgcgttgctcaggcggtcccagcgcttgttctgcttctgcatgcccttcatgcgcagctgcgccgaggacgtggtgggggcgttcgggtccggcttgtcgacgtagccgccgcggccgccgcgcccgccggcgccgcgtcctccgcgcccgccacggccgccgaagcgctgctggttccacgtggggcgcaggcggtcctccgtcttggggcgcgtgcccttggacgtgtccaccagctggaacgtggcgtcctccttggagtcgtgcttgtactggaactcggcgttcacgcccgacgggtcgcgcgcgtagcgggagccgcgcggcgcgtagttggacacgaagtcggcggccttgcccagcttgtcgcccttgttgaagggcgcgtaggggatgttgaggaactgctcgggcagcgccgtggggccccagccgttggcgttcacgtccacgcgcggcgtctcgtacgaagccatggtcggagcgtgcagcgatcgaggaatgatacacaccaggtcaagagggaaggggagctcgctgcgcaccagtcaacagacgtgtgtttagtgtgtacgtattgtgtacgtattgtgtgatgtacatgaatgtagccatgatgtggtacgtgagaggacgttgaagtcgacgaaagtggacgttatcgtgttaaccttacacttactcgacggcttgcacttcttccggggtcaggggcgcggcgtttggagcggcgtagtcgacgtcttggaggtaccagcccacgcgcgcggcgatcttgtcgtgcgcccactgcagctggggcgagtctcgctcgctcgggtagtacatgtcggcgcagtgcgcggtgccttcgatgaacacagcctcggccgagaacgagtgcagcttggtcgagttctgcacggccagcgcgtgccacgggtcgatggtgccactcgggaacgtcacgcgctccacctcgatgcccagcgagccgtagtcgaggttggcgccggccacgtctggagccacgttcatgccgtacacgcgcttgcagatctccgtgccgacgttcgcctccgtgacggctttaagcgcgtggaagggggagcgcacactcgtcgtggtctggaagtagccgaactcgttgcacgtctggtacacccactggcgcgcgctgctcttgccgtcgaactggtcgcggctcagcacctccacggtcccattagctgcaccctcgaacttcgagtcgaggcagtcgccaacgcgcgtcttctcaatgaacgacgccagcttctccactgcatctccaggcttggcgaagtgctggcagacctcgtccagcgtcatgactccctcgtggatggcattgtactgagcaatgtcctggagcgcccccatcaccgacgtctcgaacaccgagtcgtcgaactcgttggccatcgggtagcacggcttgaagagctcgtccaccttgccgcggtcttccttcccgccgtccatgagctgtccgagctgcgtgatggcttgctccacttcatggtagcactcgcctcctccaaagtacctcagtccgtccccaacgacttccatgtactcgtaaaagtccgtcttggcatgaaccggcgcagagctcgccacggttccagcaaacagcgccgggtatttcaacctcacccacgccgccaagttgcccgggtagcttcctccaaaggccacccacttctcgtctgtgagcccgtacttgtctgtcacgaaggcgtggaagtgcgccaagtcggccaacgcctgctcgctggagagatactgcagattgggcagactcatgtcctccgtcgggtacgacttgccatagaaccgatgctccagagcgagcagcagcgctcggtgctgctctgccaggtagtagatgaaggtgcggttggtgatggccttggggcccagtgggccctctcctccgatgtagaggaagatcgggaacccgtggccgccccagaactcctcgttcacctggtacctctgcttccacgtcgtgcgcttggacacgggggcgaagtggtccagaatggcttcggtgaagtagtcctcctggatggggaagtctaccgggtcgtcctcggactggtgcacgtcgaactgtacgaaatactcgtggccgcggaagtcttgaaggcgctgtagattgtgcgctcgctccgctgaagactcggccaacaccgacgacagacagacgcacgcaatgatgcagaggagagaggagaaccaacgaggcggcgacatggctgcaacgcgctggcaggcggggggaggagggtctcgctcggctgaagaatgatgcagcggatccaagaatgatacgcatcctcctctgcccgtgactagcatcgaatatgacgggtgtagccatctgacagcttcaacttggaggaatctactttagtgtggaggaccaaggagcagacatgttctgtgctgaaggtgacgaaactagggctattgtcgatgtcaccataggatcgagtgtatcatgaatacccgcttaaaatccgggctatgagtctattacaagagtttccgttgaactggtacgtgcactttcttcctcattgctggcaattcaacaccttcgctggactctcctctaattctggtccggttcgaagataagaaagggggtacgcacaagttgttcggccacacaattcttcttgcacatctcccgtcagccatgtcgagtcgacatagaaaccagggatcctctcgcattgtggcaggcgctaccggtactagccgacagagctcttctcgcactacaacaggcctcactcgacagaagtcggcacaagtgctgaagaagtatgcgtcaacgaggaagttcggccgccgacatgagctgcagcgagaagatgaacacctccacaacacagcgatcgtcgtctattccaagcgaaacccggacgaagaggacactgtcatgtccgcacaggtaagcgaatgctttagactggaagctgcagcagctcgagctaactgtgacgttgtagtggcggatatcggaggctctggcttacgaaaagtcgatcgcccggcgactagcagctttcatcaaccgcaaactcggaacaacttcttgtcacaacccgaccgtcatcttggaccacgtcctgctgggtagccgcgagaacgctgaagacagtcaactgctcaactttttgggtataacgcacatctgcaactgtgccaagcaggtggggaatagctttgaaggcgagttcatctacctcaagctgaacctgaaggattcccaggacgaagaactgatcccccacttccaaacagtagctaagttcattaaacgcgtcgagagactgcgaggccgtgtactcatccactgcatttccggtgagcaagctcatctgaagtgcccgcagtcctcgctccactcacactattcgtgattctccactgtttcgtaggtgcttctcgttcaccggcactattggtagcctatttgatgattgacaaggatatgtcgttgctggacgcgtacaacatggtgcggcgtaagcgccacattgtacaaccgaatcagggcttccgacttcaacttgccaagtacgaacttatgctgcatggcgcctcctctgttgcaacaacccccgacaaagactggaacttctacgcttggaacgaggtcaaaaacgaaagacctgttcgtcagaaatgagcccaaacgggagtaccaagcttgaggagtgagccttgctgtgcctcagtttccgtctggaaaagtctccttcagctcaaacccgtagaaaaagtttgtccgggtgcctagcaaacaccaattatcgatcagaaccggcgagccaaacagcgggccaatctcgctgttgtctggttcagttgatgcttttccagacgggtcacaagtctggtaaatgatgtaccccgtgctttcatcgcagaagtacaggtggccagctgtcgtcgtcacgcagcagaccaaaggctcgccggtggtgtcattcaggcgaaagactgtcggcgaggcgaacacagcaccatggagattggtggaccacacgagctttccactatgagagttcacttttcgcagcatgccgtcatgtgagccaaccactgcagacccagtacgatagacgcagggcgagctgaagatcggcttttcagttggaagccgccacttaatgttaccggaattcatcgatactccataaaggccaccatcagcacaacccgcgacgagtatcttggattcagggtcggcgtttagtccagcaaatactggggctggtagctgcaatttccactgttcctcgacgtcgtcgccagtggaggaaataaactgaaatgcctcgatatttccacgggttgtggcagcaaagagctgctctgaccagccacagtaaagcggagttgagaaaatactgccctgaagatcgattgcccactgtttgtgcccagttgcagcgtccagaccgtataaattgccgtcgtatgcaccgaaaactaccagcttacgataatcgatcacaagtgccgaagattttatcgtttccttagcacggaaagtccagcgagtgtctcctgactgcagctccagggcataaagtcttcctgcgtaggtccctacgtaaacaagtccgtgcttcacactgagcgcagcgcttgcttcaattcgatcgtctagcgtaactcgccagatctccctcccattatcctgcacgtcgacgcagactaactgggaagagtgagagccgacgatagcccaggtggaactgactgcaccattgacgtcgtgacgctgaattaccagaggagacgcatcgatacacttctccaaatcaacacgccatcttcttgtcagcatccacgacgtgctcaatgactgcgggcaggcgtagcaactcggtatgaaaacgccgttgatgcccagggaggattggttgtaacgcgatagataagtcagcgcaccagggcagcgtttttcatcggcgcttgtagcaatgtccgtcaccagcttccgccgcttggtcgcactaccagcctgagaagcagtcttcccggctataggggctttatcacggtgataaactccatgtcgagtcgaatcagggaaacgctttaccccggtattctctttccatgaatgtaaattagataaaactgctccaattgtcatcccgagctatacaaatgcgacaccaatgagtgggtcagtacaatattcagctggatctgacagaagaattagtacaggacgtaccaattcgtggcttttgactgaatgcgccccaaagattttattgagctcgtacacaatcaaggtagccagcagcgaatttgcgccaagttcaccgaatgtccgagcttgaacctcatctggaatctcaccctgaagctcaacatcgagggtttccttcagtatcgtcgcaagcatcttctcaagcgtgcttgttgcattttcattggtggtcgagccttgcatcgaactgttgctacctccagtgtcatgaatgagaagtttttccagcgctcgacggtcaatcttcccgtgcgaaagccgttgcaccgcatcggtaggcaccacaaacacttgatgtggagtatgtgatgctccatagtgctctgcaatccaaatattcagagctttcacgcgaggatattgaataaccgaggcgttgaccatgtcgtcacgaatgatgcaagccactataacctgttgaagtatcgcgtgcttacctacctcctttgtcgtcgtgaaagcgatcacctgcatgttggtcaaatctggtgaatctggcaatctcttggtaccgggagcatcggcatctgtcgtttctcttagtgcggcagccactgcacgctccacggcctccaagtaaactcgctgtccgtgaatttttacggcataatccgctcgtccacaaaagtagaggcgtccttgaattacagagcagacatctcctgtgcaaaaccatcgctttgaagccaagagttcattgttgcaactctccagcagcttgtctgaggttacgaacgcgtcttcatcgtggttattgatgtagccaagcgatacaagtggtccagacacataaaggattccctgaacagcctcaggagtagtctctccggacggaggccacacaactgtagaggtggagccactcaattgagaactatcgcttgataccagtagcagagatgtttcctcaccacccacgactccattgttacttagattagcaataggaacaccacgttcctgccattcagtcatttgagcagaagtcaatggcgcattcaactccatgcacgtcacgtcgccgctcatttccgtgctgcctgcaaacgcacggtacgaattagttccattcagtttcagataaagagagaaagagtgtcctgcgtaccgtaaagattcagaatggtcacgtctggtaaggctgtcgtaagttcttgaacgacacgcaaggagagagcttccccactgctcaagatatagcgaagtccggtcaacttttcctgccgatcagtctctcttgtttgcaagagcaacatcgccaacacgctcgggacagcagtgaaccgtgtaatgcgctcggtgcgcataacttccaaataccgcgctctatcatcgaggacgacacttttcgcaatgccctggtctgcggaaataccgtcttgatgtcggcgtggctgttggatatgaaccagaggcacgcgctgcaagaacgcaccgagtatttcccataccgagtccacaaacgagagcttcgtagcccgcagcactctttcactgttgttgtccgcaaacggatacgccgtccacatccattccaatcgagtccaagctcctgtgcgcgttcccaatacgcctcgagactgtcctgtcgttcccgacgtgaaaagcacatacagcggcgcggcaatagcctcaccattcttctccgctgtcactttccgtcgctgcagcgattcctctcgctcagactgaaagaactcatccggaaacaccagcatttgcataggctggaacgggctcgtcttcaagtcgacggttctcaactctacgaccccggtcacttggccatcgctcgaggcaaagaacttcaccagtggactgcacgcagtcgtcacgaggcgctgaatccccgcacttctgaccatctcaagctgtcgagcgactggaagctgagcatccacgggcacataggcccaccttctctcctctgccagcagcagcatcaacgccgtctcctcaaccgagaacggcgtcacattgacccccacggccccccactcgtcctctccaagactcaacgcagtcttcacctcccgctgccatgttcgcacctgcaaacacgagacctcctccctccctccaccactgcaaaagctctggatcagcgccaccgcctcgtcctccgcgtgcagcgcccagaacctccgcagacattgacacaacctgctcatttattggctcggagcgtgtggctcgaatctcgggtcgggaacagctacgataacgctccacatacatccacccagtttgcacacgtcgcagaggaacataaaacagcatcacccttcgtgatccggagacggacgaacagccccatcagaccgagatatccctcctctgctctgatcatggacgccgagcagctccccttggtgcaccgcgacggctctggccccggcgctggagccagcagcagcgactcgctgcagcagcagctctccagctaccacgagcgccagcgcgcgcgccagaagcggcgccaccgctccaagactgtggggcgcgccaccgtgggcttcctggccgcctcgctgctcgcgctgcttctggtggcgctctcgtggccggcgcagcgcaatgagcgcgcgctggagctgcgcgcgctgctggacgcctacgagcacgcgcgcaacttctcgggcgtcgtgcggctgagccacaacggccagaagaagctacagcaggccatggggctcgccaacgtgccgttcgcgcagcccatgcacgagcacagcgtcttccccatgggagcgcacgtgcagctgctcacggctgtagccatgtaccagctgcaggagaagcgtgtcgtggcgctcgagcggcctgtggccgagtatctgacggtcaaggactggaaggagttcggactcgagaggaaccagactgcgtggtgccccaaggtcggtacggccggcgactgcgagcaggtgacgttccagcacttgctgtacatgggctcgggcatccagagcagggagacgacaagcgtgcagacgttggagacgttggggtccttcggtcgacaggtcggacatttcatcgacgccccgctggcgttcaagcccggcacgagctacaagtacgcggacgagaactacgtgctgcttgcgtacatggtggagaagctgagcggactgtccttcggagagtacctggacaagcacgtgttcaaggtgctgggcctgaagctcacgcggttcgatccgtacgcgggggctctgggaactcgacatggacttgtggaccagtacgtgcagttctacgcgcatcgcaagccgaacgtcagtgagagtgagagtgagagtagcagtagcagctcgagtggacctgaccagatcgcggagaagcatctgcatcacatggcgacgggatcgtgcgccatctaccagggactcgacaacagtcttcacgggttgcagtccactggcaaggacatgcacaagatctacacggacctcttccacgagcgcggccaccactcgaagcttctgatgcccaagtcgatcgagcagatcctcaacactcgcaacccagagttccccgcgtttgggcaaggaattggcgtcgatttcgaagagacccctcaaccagcggcgtggcccgcaaagatcgcgttctgtggtcgcacggcctgcacgacgacctgcatggcgatgcagatacccgcagccaacatgtccatcgtcgccagcgcgttcagcaacgacgtgcgtctgtacttcccgactgtcgacgcgttccaggtgtacacaccgcgtgatttcctcgataagcgcgatactgcagtcgacaagaacgcgttcaagaagaacgacggtgaggtgaacacgttggcgtggagcttgctgcaagtttttctacgatactacgcagcccccgataagtgaaaaaggaaagctcacgaggtgcccctgcgtaaactaaagcttttaatgaggtgcccttcagatgccccgtataatctagctaccgtacaagcatatgtagttaccatgatggtatcctcaaaatgagcttgacgaaatggatgtagcccttgtcaagtaaagcgaggtaatggtgcctgagagaagcgcaggacaaaatgaccatagcacgccaaaacatacactgtacagcaacaaatggcttcaatcgcaaggaaaccaaatgtgcggtcgggtattggcgggtcgtcatgaatgtatctctctaccaactgtagtcagtgtctgtggccttgaaaagttaggtgctgggcagttggtgctgaaactccggtacgaaggctaccatatctcattagacttttagttcacaaaggggtaccccattaggacccaagtaagtgggttaacctcaccggcccaagtagaaaaatactacgtagtataatacacgttaggtatctcctcattacatggatgtgctaccagtagccgcagcacgtcttgctgtcgccagcatggcctccccgaccttctcgacgccattccggattcgctccaccacgaacggcggcatgtaaatgtcggatttacggatccgcaagcaccaccagcgagtgataaccaccatgggctccccttcctcggactggtccattgcgaccatcgtgatctgcgtcatatcctgcctcacacgggtctctgggcgatacgggaacagttcgtcttcgtccaccgcatcgcagatcataaatccaaactcgggctcgccacttccgggtggacccgcggggcggtactccgcaaaggcgacgttgtttgtgtctgtctgtaccatatcgccgactgtagctacaagacggtgttgtgccacgggacttcctgggatggcgtcgtcattctcgcgcaccgtgatgtctcctaccacctcggagaggctgatctcgatattgtagacgaagaactggagcgcgtctatgatcgccttgacactgcgcccccccggcagcggcgtgatctcgaagcgggttgacacgaggtcgccgttcgttgcttcgtacttcttacggtcgcagaattccgccgtggacatgtagtgctggtgtctctgctgcatgaaatgatgaccaacctgcagccggtcgttcttcatcttcaacagttcggcctggcgcgcgaatggatccttgctcaggcgtgccggtagatcaaaaggctctgttgagttgtcacgctgtaggtagcaaggtgaacgaccaaattagacgccgcatgcaccataggctcctcccagggctgaacgtacgaagaattgcgtgaccatggacaaggtgcttgcaaacgagagtcgctgcgaatgaagggcatggcgcatgttttggttgacgttttcgcgctcgataagcgcctctcgctgctttagaatctcattccggtaggcgtagtactccatctgcttcttcagtcgcttcatctcatctgtcagctcctcgatctccgtctgcacaaggacaccactcagtacgcaatgtaaacagcagcggcagcaactgtaagagtaacagcactcactctccggcgaatgtacgtccggattttgggctttgggggcttcggctcccgcttcttcgtcgtgcgtcgcggccgcttggccggtcgagcgacaacgtcaacatccggtcgaagttcatcgagcgacgcagacacgtcgctggctgtagatgctgctggcgttacaggcacggacgtggaaggctctgaggctgaagctgaggctggagggctgctggccatggcggcgacctgctcagctcgaagcttactttactcgaaggactgcccgttgcgcactggaggcacggatcaagcgtgacgtaactttgatgagcatcatcatgtgtgtaccacccaaataacctcatcttcaagcgaggttttatcgtggaatcccaccttgttttgagaaaagctgtcacgaatacggtccttgagcataaacaaacgtgttcaacgaaagcgagtttgcatcgaatcgatattcgtggccttgaatcaagcccccggcagtctgtaacgcaacggcaaaggcgcaaagtgactctgcctagacggggtgtgttgagttcgagaagggtgcttgtgagacggcgacaaaacgagcgagacatctgctagttgcgacggagacggcggctctgcagctggtgtacgttactttctctctcagcgagaatggtggatggggggggggtctggttcgaacttcaaatgtacttccggggaaaacgactacagctgtacatgtagctatgtactcatcctactgcagcctcgcctcgcctgcatacaaccagtggacttcgcggcacaccgttgactacctttgagcacctgggctgtatcatatcgctacgtgcacaataggataacacaacgataccagcaggctgctggtgcaaccagcaatgacgaagatatccttctgttactagggattatacatgtatcgtgctgcattcgaccgtatcgagctgagtaccaagtacctagctatttgtgatgatgatacaaactgtaccgaagagtccacaccttgggcttggatgggataggaaggatcgactgcgttgctctaccggtaaagctgcaccactcccatttattcacctttttatcattgcactctttctttctcgtcctcgacgtcatgctaaaacgaatggacagaaaagctgctccaaaacctaacctttgaaaccaggaccagtcatatgctacggtatcaactctcctcaatccagggacagtggtggcttgacgtggtaatgcaccatgcagaccgcacgccggccggaagcttcgttcggggacgtcctggacggcgccatatcggacgtggtggaccaccgccaggacaaatggtacggcgtcttcatgccggcgttgcgcaccttccactcgcatttcggtcacacggaggtgcccgaggagttcgtggtgccgcattcgacttcgatgtggccgcgacccacgtgggggctgcacctcggccagatcatcagtcgcagccatgacaccaagaggctttacagggagcaagtggaggcgtcgcagctggacctgcagaagttgggcttcacctggaaggtgacgaatgccgcggatcggtcctggaggcaccaggtgctgccggcgttgcgcgtgttccaccaagagcacggccactgcaacgtcaagagcagcttcgtggtgcccgagtgggatccgtggccgaaacagtcgtggggattgaacctcggagccatcgtcaagcgggttcgagcggggaagagctacgccgaccaagcgactcaagacagtgcggtgctggagaagctggggtttctgtgggacccgagggatgtcgagtggcaggagtgtattctaccggcgctggtcacgttcgcggatgagtttggggaggaagtgccgttgacgtcggactttgtggtgccgtccgagccgccgtggcccaagcagacgtgggggctcgaactcggattgttcatgagtgacgcgcagaggagagagcagtactttgtgcagattatcaaggacgcgcatgtgttggatgagttgggcttcgaggtgagcttatcggacacgacttgggggcgacaggtggtcccgctcctgacgatttactcgacgatttacccgaaccaactgaagcttgcggaagatttcgtaatcccgcacaaacaaccttggcccaggaaggtgtgggggctgaagctaggcgaaatcggagcgcagaatgccatgcgcttggctgatgcggagctggagtggaaagaatggagagacttgccagagactgtatcgcccgtgtcggagaacagaagtcagcagtggaagatccggatcttcccagccttggtcacgttcgtcaaagtgttcggagattgccgacttggcggccacttcaccgttccgtctgaagatccgtggccaaagcccacgtgggggctgcgtcttggcgctggaattgccgactattataagaatgggacgtacttcgagcaactcggacgagacgcagatcgcttggcgctactcggatattccttcagggtatcagagactccgtgggagcagtacggcgctccgttacttgagacctattcgactatcaacccgtgcgttgtggtgcccgagaacttcgtgatcccatctcaagctccgtggccagaaacaatgtggggcgtcaagttggggatcctggtgcgatggaattcccagctcatgacctcaatcgagaatgaatggagggcgcaggtgctggcggcggtcgaagtttatcgaacggggtttggagacgtgcctatcggcaagaaattcgtgatcccgtcgcaactgcaatggccgaagaagacgtggggtatggatctggcacggatcttacatcgtttgcatatcggggagtgttacgacggtcatggggctctagcaaggaactcgatagctaggctaaaacacctgctgcaccgtcgtcgggatgaagcttgggagtcaatattcacggccctgcaggcattcaccaacaattacggacactgcatcgtaaagccacatttcgttgttccgaccagaccttcgtggccaaaggcggtgtggaatttgcaactagggcagatcgtcgagaagatgatagcaaccggcaactttttctcgtacgctggacggactgccaaccggttgaacaaactcaacttcagtctgacgctgtcgagctccgcgtgggagaagaaagtcgctcctttgatcgccacttttgctaatctccaccctcgagacgccatcccacgagcggctggaggtggcttctcaatcccatcggaggaaccgtggcccgagaatgtctggggagtgaacctcggagctgtcgtgcagtggaatttgaagcgcttggagaccattgaacgggactggaaggctcaagtgctacaggcgaacgaagtgtatcgatacgagaacgggaacaaggttttgcgggataaattcgtggtgccctctcgatctccatggccttctaagacttgggggcgcgagcttcggcacattttgacgtgcgttcagattgggcagcactacgggggacacattgctctcgccaactttcactcgaacgacgcctgcgtcgtcgctagtccacagaatgagcagcagtggaaggcggtcatcatgccagctcttcacacgtttgccacagtctttggacactgcgcagttgaagaagactttgtcgttccccctctttatccatggccaaagtctgcgtccggggtgaatctaggcagtgtcgttgcagctatggagaagctcgggctctactttgccgaggtggggctcaacgccgatcgactggagactttcggcttcaggtacaagttggccgatgcgccgtggcaggagcacgtcgccccgttgctgagtacattcgcgtctcagtatcctcacgagattcttcccgaagactttgtgattccagcaaaggactcgtggccccagcagttctgggggctgaggcttggcaagatcttcatgtggtcctctcgatacgtctggaatcacaactacggagcgaaatggacagagcgcgagatgccagagaacacaagtctagcaggagagtatggctactgccgcgttgcgtctagcttcagggtccccagcgaacttccgtggcctaaacaaatgtgggggctgcggatgaagacgtacctccgtcagatgaatcaaagcggcgacctgttcatccctggcggacttcaacgcgccatgatgaacgaacagcagttcggcttcgtcttcaaactcgctacggaggtttcgtgtggaatgccccaacgcgacgagtaccgagcagatgaagagcagatcgagcgtatcaacgttgaatcagaagaagaggaagaagttgagcctgaaaggttactgggcaagcaacagctacccagtgcgttctgcaagaaacgagagggctgggtgggcagctactcgcccaaggctcgcaaagctcgagtggagaggttcttgaagaagcggcaggagcgcgtgtgggtcaaggaggtcaagtacgacgtgcgtaaaagttttgcagacacgcgactgcgtgtcaaggggcgatttgtgactcgagaagacgagaaaactatgcgggagctgctcagcttcacgtgatccgatctacagtatgaatgagctcaaacgaacttctcatgtaccaataaaacgtgacatacgattaccatttacatgtagctggtgtttcaccagctagcgtactactacgccggtggtgaagtattacgcttgttcctgaattctgttcttttgaatcgaggggattgggaagcttggactggacaactgggcaacagatctcaagctgtatcgattactttcctgcattctatgccgcacaaacgcaagcagaacacgtgttgcaagtgctaaaggcatgattcgaagctacccaaccgcggcgaccttcgcagcgtcggcacccgcgacaccggccacgtcttcatacagtgatgcacttgatttgtctgatgaagtcgagtcaccacgctcagagcctgcggctgaagccggtccgcctttgaagcgaacacgacggacggtcaagaagcgagagcccaagcccaaaattcggacgtattaccgacggaaggtgagaactatgtcggtacttgcatatcggccgtctaccagcacgttctaactgctgcaggtagacagagatcgaggagctcacagacgagatggagaagctgaagaagcagatgaggtactaccaggcacggaacgagacgctcaagcagcgcgagacactggcagagcgccaaaagatcaaccgaacaatgcgcgaggctcttcaagcccaacgtctatcgttcgccagcacggcgtctctgatcacgcaattctacgtacgttatcgtgctctactttgtaaaaatattcgcagatgactctaaactcttatgttaattggcattattttctagcgtgatagtgtcacccagccattcgatctcccagctcgcctcggccgagacccaatggagcgtgaagctgtgcttctgcgaatgaggaccgaccgcctgcaggtggcgcacaatttcatggttcagcgtcgaaattaccaaaccacgtcggaattctgcgatcgtaagaggtttgaggcctcccatggggacctcgtgtcactccgattcgaggtcatacccctcccgggtgcgcgcagcgtcaagacaatcatcgacgcgcttgaggacttcgtctacaacctcgagatcagtctgtctgacgccattggcgatatcacaatacgggagaacgacgatcctgaccctgatagccccgtagctcagcatcgtattgtggccacaatcgctaacctggtgcagacggataccaacaacattgcattcgccgagtaccgtccagcagggccgccggggagcggcgagaacgaattgggcgtcatgatctgcgacgctattgacgaagacgaactgttcccgtatcgcccactgcaacgcgtgaggcaagacatgaccgtcatcacgtacgtgacgcatgaacacggggagaatggagaaccgaccatcgtcatgactcgctggtggtgccttcgactccggaaatcccacatctacgtgccgccgctcgcagtggacagaatcatggccggcgtcgagaaagtgagtgcggcgatgcttcaaaccgcacggcgagctagtgggttggccacatagacgacttatccgtctaggaattagcaactcgtcctaggtaggacgtgcacgagccttgagctcatccagaaaattccgtggagtggcgcttttgttgttgggtttgagcgttggtggaggcaaagcctcgttactatccgtggtctcgacgctgatgctggctttacgagcggaagcactcttgagttggtccaaaaagttcatgggcttcgaggcttgaccattgtcaccggtatcttccgtcgccagttttcggctcgacgcgtttttgagttcgtccagaaagttcatgggtttcttggtgctcacgggggtggagggctgctcgctgttctcagtttctgaacttgctgtctttcgctgaaaacgattttgtaattcacccaggaaattgaccttcccgcctccaaaaggtgacggtctaggagttcctggattcgagttctcagcttttggcgagttgccgttctcttctgccttcctagcctcgaggagcttcagcaacgctttcgacttgggcggaacgacaacagttggcttcggtggttttggttcgtcttccttggctgatatgctaccagacctgggggttagtggcattgatcgtgagcttcgtggcgttcggaccatttgctcctctttcgtgatcgagacttcacccgcttcttccgactctgatgctttctgggatggcgatagaagaccaccttccttgccacgcatcgcgcgcttggggctgcaaaagtctttttcgaggaactgcaggacaccaaccgctacctgcagagacttgactcgtttaaacccgcgttgtggagcctcggttgacccttcaggtgtctcattcgacacagaagcatccgtcatttgcttatcctccagttgcatcaagcgtagtgcttccacttcagtctcggtcatgacaacagactccacctctgcagtctccggatccaccgagactgcttggctttcctccacgacagccacctcgctgatatcatgactccgcttcgctatagcgttatccagttcccgcttcctcgcctcagcctcctcctcaacggacagcttcttgaatgctgcacgctctcgaggctgaatgtcgacatcagctgggaatggcccacgaatgcatgccgcgttcctaacttcaggatctagagctcgaatctgagccacttcagcttgatactgctcgtacgtcggggtcattgtcgaccaagcgcgctcaccgtgagctagctcgcccttgacagtatctcgctccttgcacagtgtcaaatgctgctgcttggcttcctcgcgtagagcgatcagagtggctttgccaaaagagcgcaagaggtcttcattgcgagcgtcctctgctacagcgacatattctgctttagcttgcgggatgagttcctcgtccagagtcttcaaccgcgcgcgcttggactctagtcggatcctttggcgctcgaacttgtctaagcgcgcgtcgatctctgcatcggtcgggtagcagaagatcggattgagctgctgtcttgctgtgagttccggtagctgtacgtctcgccttgcgcacttggcggggtcccagccagcctttatggtctcgtgttgctgctgagcagcgagctgccgcacgtgctcgataaacgatgcacgccacgcattcttccgacagtccttgtcaaacgcgaaggtgtctgggaggactcgagccatcgcgcgcagttcgttgatgtcgtaggtggcgaagtccatgaagaagggcgcgctctcgatcgctaagaagttggcgcgcgcaatgtcgtcttcatgagtgaccaaccagtgcaggaagcgattcgtcttgaggtaggcagcgaggtcgtacgtgtacaatacccctccttcctgagctcgagcgataagagcttccactgacaagtctgcgatatcaattggaacgtacgttctcatcagtgccagacactcctcgtttttctcgcgctgtttagcctgccacgccgcctcgcgcttccgcatttcatcagcaaactctttggcctgttcgcggcgcgtcttccagatctccacgtcacgcatggttcgctccaactcggtctctgtccgcttcaagtcgtgcgcgcgtgacgctgtgatcctagaggcgagttgagtagcctgagagcacagcgtggacaatcgctcgctgccttgcgtgcactccgggattgtacgcagtgtgtagagcaacgagcgcttggcttccagcgtttgctcggaaattacaggtgaaggcgacaagtcctcagcagcgaaagaagctccaaaacgatcggtctcagtccccagccattccagcagcgtttgcagtattccctgctccgatttgagttgctgttgcaccgtcaagagttcttccttgatactttccagccgtttagccgtcgagatctccagttgtgcggctgaggcagcggctgaagagtctagcttggctcggtgtagctctgcgtccacgcggactgcgcgcaagttcttcttggtctgcaccatatccgcctggtacgtggtcgctttcgtctttagctctgcaacttgttgcgcttgtttctctagtgagcgcagtttggccgccaaagcgacgttggccttatcttcgtcagcacagcgagcaggcttggacagctcctgcatctcaaatactagacggtcgtagcgttcttcacaggctgcaagatgtcgatctgccgcgaggaaggcgttgcccttggcgctctcaactttccactgcaagtcttcgtccgagattccaagcgatgctttgagtacgctcacctgttcctgcagtttctcgagcctgttttcacgccggatgaacgacgcgcgaggacttgagcctgaacctggagaagccgtagaattccctgcatctgaccccccacttccacgcactggcgaagtgatcgggccgattggagcgacactaggtcgacgtcttccaccagggccaactggggacataatcggcgaagacgtgcgccgagaaacttgcacgaacacaggctcctggtgctggtgctgctggaagatcgaagagaaggtcctggctttcgacggagactgctgctgagttggcgccgttgaaggccttcgccccgccatcgcgccggaccgaggagatatcatgctagctcgggttattttccttgaactgtcggggctgaggggcattctgctggtcacctgcttcgcttgagtagtcgggcgttgattctgcttgctatgtacacgctgtggagccccaccgcgacctagtgacgtgctggttgtgtttatcctgtgaggtttcgtagctgctgccggtgacttggtcgctgctgcaggtccggggtgtctccttgcaccacccgtcggcgatgacggtctcctggtagtaacgacgcttggtttccttcgaggcgcgactgccgctcgactcgccatcgtggactgcagcgagtacgtcttggcaaacacctgcttgatggcagcagcagtcggggaccgtccacctgggggcagatacaccatactggttctccgctccttcgacggactaccggcgctattggtcgctctcgaccctgcagagtgtaccgacgcccgcttggctgcaacagcggtaggtttagagacttggttgacgtgggcagtggagctgtagggttggcttgagctggatgttgaagttgttgcatcggagctgcgtgggtctcgagatgatgcagtcgcagtagttgtacccattgttgacgccttcttgatgggtactttctcgaggccgaacttgctgtagagtagcttcttgtgttcgaggagctcctggccttccgcgtagagccgcaagcacgcacccgctgcgatgttgcgctgaggggctggaggtggctggttggtggggcgagaagaggacgctgaagcttggaggttctgctgatggacgcagggccccctacgctgcatactctaatacagacgcaccagctgtctgccgtaaatgcggcatctcgcaagtgccaacggcgctggacaagttgagcagctattcttacgcgcacttcaacttagctgcaatttgggtatcttacacaatgtatccatgatgttatggctacatgctgagattgacccacacttttcgaacagccgcgagatatgctgccgccgcgtctcgtgtgtgcgtcctgcagcgtcgtcggggccggaaccgcgtgccccaagtgcggtggggagctcagcgcccccagcgccttcgactgcgccaagctggggctgctcccggagctgcaggagctcgtgcagcaggtaaaacgtcgtaaattgtccagctcaacccatagttgggcgtgttttaacagcttaaatgtttaggacccggatttcgacgtcaatgcatgtgatgaagcgtcgaatgcgacattactgcaccatgctgctattagtggcaaaatgggggtgatcgagtacgttttgtttaaacacattctttatgaagattcattgttttaacgcttttatggcgataggtttttacttggaaatgaagacctgcgagctaaaatcgaggtggacgctctgggtggggagatgcagacgacgccgctcttctgggcagctttccacaatcagatctacgctgtggagctgctgcttcgccacggggcagatcccaatttccgagacggtcggggctttacgccgtttctcgtggcgattcaacgttgcttccccattacagctgcctacatgatcgctaaggggtccgatgtgaaccaacggatgcagggtgcgttggctgtgatttgagagagaaaacgatcactgttgatgctaatgctgcatgtacttgtacgtctcagatccgagccaaaagtcagcgctgatgctgctttgccagccccagcagtttcacttggatacttttcggatggtgctaagccttcaagctattatcaacgcacaagacgccgatggcaacactggtacatcatttgtttcaggtagttatccaatcatttgctaacttcactttcgtacctgttggaagcccttcatcatgcggctatgaacaatatcgccatggctgtgcggatgcttctggacgtgagagctgacacgactatcgtgaacaaggacgggcttacggcgctggcaattgctcgtgtgcgactacatccagactcgtcggcccgtcatcttctcacagaagacgagcaactgcaacaacttgctcgacgtacctcaattcaggttcggacctgttgtgaatacggtacttgaacttgttttcttaacaaatctcaccgagaccatcactgttgtgcaaatgtcgacagaaacaaaccctcgaggacaatgtgtacaagctcgcgtttttcgtaccgtgggtggtgtttcctctagcttgctacgtgatcgtgactgtgaacggcacgctctacatcatgttgtcgcttgtcgttctattggttgctgcaatactgctgcttaagttgctacagcgtgggtcttacggcgacaaacgaaagggagcatcactcatgttcgggataaacgttgcctcgatcgggtatcttgtcggtagcttccctcggttcagcagcgagtgtagcaccgtgttctgcgcatttgctgcagtctctttcgtcatgattggagtcactctgtacaaaacggcaacgtcggatccgggcgaagtgttcacgtcgtacgacgaaaagctgcatgtacgttggctgcacattatttttagtgctgctaggaacaatcttacgtccttgtttattctttcgatttctagaatatccgctggctggtggagtccaagttacccagcgcgaccaaactctgcctcacttgcctgcacaagaggccgctgcgtggaaaacactgtgctgagctcaactcgtgcatcgcaaagttcgaccactactgtccgtttgtggttaacgccatcggtgctcgcaaccatgcagctttcctgggattcctgttctccgctgtgctgtcgatcgcgttggaacttgtggcttgttggcgctttgcacgcgtacagcccgagctcgtggccgacttcaccgttcagtggcaatggtggaagtggaaatcgtcgttgtggaaccttctcctgggcacgtttggcagtgagccggctgctgtcgctgatacgccagggctattcgactggatcgggagcattgcgcactttcagccagtgctgttctgcatcatgctgctggacgttgtgcaaattgcgtggatcgcctacatgctgttcttccacgtctacctcatgtgcgcggccctcacgacgaacgaggtggtgaagagcgagaacctggaacgcgcgtattcccgtggaatcctcaataacatcgtggacttcttaggtcttcctggtcagcgacctgtcgactggcgtcgggtgtacaacctagacgagttcaagaaccaagttgcgtcgtacccttcatcaggagaagcgcgcaaggacctgtaagcttactgctacagtagtgagcaaggcctatcaagtattcaacacccacagttcaatcatttgccaagctaaaacaaaagtcttcagcgtttcctctgtatttctgattacccaatgcgttcaagacagcgcaaccgtgcactacgcgagcgcgagttagctgcgatctcttcatcagtagctttggtagcttttcggcgcgttagacggaagcgcttcttgctcaatggatcgacgccctctggctcctcttcatcgtcatcatcttcctcgtcgctgtcttcaaatgcccactcgtcctcctcatcgtcatcgtcgcttactctgcctttcttgtcctttaggatgcaccgaaaacaatacatgttagcagaagtaagagctaacctcaacgccagaaccgaggacgtaccaactcgcggaagaagtccttgatcggtcggtcctccagtgaatggaacgcgatggtaactaacaaacccacaagcattagttcatcacgaccagtattctcaaagcatttttgcgtaccgagtcgtccattgggagccaagtggttcgcgagctgtttgacgccactctcgacgtgattcagctcgtcgttcacgtagatccgcagcgcctggaaacaacgtgtggctgggtgcgtgcttccgaccttgctggccctcttgcccttcttcttcttgctcttgcccttgtctgccgacctccacatattggcaatgcgctcgatgcactcgcgcaggtccttggtggtctcgaacactttgccgcgctcctctcgctcgcgcacaatggccttggcgaactccttggccagtcgctcctcgccgtagtccctgaagatcttggtcagctgcacctccgacagtttgttcactgcgtccgccgccgtcatcgcctcggggtctcgctggttgaacctcatgtccaaaggtccgtcattgaggacgctgaaaccccgtcgagcagcgtcgaagtggaaactgttggcccccaagtccaccagaatgccgtccacttcggccgggaactcggcagcctccaagtggctgcccaagtcggcataggacccgacctggaagctcacgcggccgtggaattccgccaagttggctcgggcgatgctcagcacctccgggtctcggtccacgcagagcagtctggcgtcgggaaagtgttgcaaaagggccctcgagtggcctccgaagcccgcggtgccgtcgacgacgtggcgaggctgggagggctccgagaggttgcgagagaaggcggcgacagtctcgtggagcaggacggggacgtgcactggcggctgcgagccatcgctgggggttccactggcgctgcgggaggcgcaagacgcagtggatgcagtgcagcgcgataaaaagagaggacaagccctggaggctcgcaacgcagtgagcgagtgcaggcgcagcagcagcatggtcgtcggcagtggtggcagccgctcgttttactgtattgctatagacaggggatatccgaatggatacacttttagtagcttttaggtggtcgtaatcgaaaggaatgcagggtcacctccgccttttcatcgtcttgctcgaaggtccagcgaagcatgcggcggaatggcagaccgactcgagctacatgtaaacttttaagttttaagtactgtacggcaacgatagcaaggcgtgcactgtgcccgcgtgcaggcttcaagtgggaacctgtcaggtccatcgcctggtctccagaaactggaccagtgcttccctccctgtgccgactcgggactgccaagtggacgtacttaaaagtgagtagtttccttttcagcgtgtagcagagcagggcggggcgcgatggtgacggaaggcttcaagagggctgcagaagagggggacctcgctacgattatggggttggtggggcaggcctcggacgaagagctggccgatgcgttggggagagctgcgggaaacggccacgtagacgtcgtggtgaaacttgtcggggaatgcggcgttgacgcggatgcgaaggcgaaaggaggagtcacagcgctgatgcaggccgcttccagtggccacatggacgttgtccggtgcctcgttgagcaatgcagcgctaacgcagacgccaaggacaaatacggatcgacgatgctgatggaagcagcttgcggcggccgcatcgctgttgtgcggtacctggttgagcaacgcgacactgatgtgaacgctgtagacgatgacgggaggacagcgttgatgcaggctgctctaaatggtcatttcgatgttgtagagtacctggttgagcgaaccggcgctgatgtggaaggcaaggataaggaaggagctacagcgttgatgcaggctgctgggcacggccatatagatgtggtagagttcctggttgagcaacgcggcgctaatgtaaacgccaaggacaaccgaggagccacagcattgatgaaggctgctctcaatggccactttgatgtcgtcgagtacctggcggaggaactcgacgctgatgtgaacgcacagaacaaagacggagagacagcattaatgcaggccgctctcggaggcgatgttgatgtcgtgcgaattttgtcaaagcatagcgaagcggatgtgaatgaatgctgcgaacgattacgggaggacagcgttgatgcaggctgctctaaatggtcatttcgatatcatagagtacctagttgaacagtgctacgctgatgttaacgcaaaggatagaatggggaacacggcgctaatggaggccgctaacaagggacacgctgaagtcgtgcggtacctggcgaagcaacgcggcgctcgcgtgaacggcaagaatgagtgtggaagcacggctatgatgttggccgctggcagtggtctgtgtgaattcgtgcgattcctggcggagcaatctggtgctcgtgtaaacgctaaggacgatggcggggggacagctttgatgcaggctgctttcaatggccatatcggtgttgtacagaacctggttgagcaacgcgatgctgatgtgaacgctgtagatgatggcgggtggagtgaaccacttgtacttgactgagcaaaagacagaatgccattgaattgaggttagcgagtagcaacaagtaccggtagctagctctgaggggcgtctccagggggagacgctgctaatgcaacacgaaagccaggttgaagcctggtacaaacagagatgcgccgagcacgaagtagtgacttggagcggagttgaacggagactggtccacgtctctggagcagagtgacacatctggaggcgagcttcgattggtactgcgtcgacacgggaaccgctgactagatcgatgtcgagtcgggcgcttgtccacgtagacttagaccattacaacgggaggacagctttgatgcaggctgctctcaatggccacttagacatcgtgcggtgcctagctgaacaacgtgacgccgatgcgaacgcaaaagataaacggggaagcacggcgttgatgatggctgctggcaatggtgaaatcaaggtagtgcggcacctgactgagcactgttgcctcgatgtgaacacgaacgacaacgaggtattaacggcgttgatgacggccgctcgcaagcgccacatcgacgttgtgcgctacttggccgatcaatgcaatgctgatgtgaccacccaggataatagaagagacaaagtgttcttgtgggtggctaacaatggccctattgatttggtgctgtacctggctgagcattataccgctgacctatacgctaagaacaacttagcatccatggcgttgatgtgagctgctctcaatggcaacatggatgtcgtgcggttcctggcggagcaatctggtgctcgtgtaaacgctaaggacgatgacgggagtactgcgttgatgcaggctgctttaaatggtcatttcaatgttgtggagtacctgacggagcaacgcgacgctgatgtgaatgcgaaggacaacaaaggaggcacagcattcatgcaggctgctcgcaaaggccacttcgatgttgtagagtacctggcggagcaacccgacgctgatgtgcatgcgaaggacaaggaaggagctacagcattgatgcaggctgctgccaatggtcaaaatcaagtcgtgcagttcctggtggagcaaaccggcgctgacgtgaaagtcaaggataagtatggaaagatggctatgatgttggtcgctggcaatgatgaagttgaaatggtgcggttcctgtggcgcttgtgtacacgcgaaagacaacaaaggagccacagcattaatgagggctgcaaataagggacacgttgttgtgagacggtacctggctaagcaacgtagcgctgatgtgaacgccgacggcaacgaaggagacatagcgtcggtccgggctgtgtataacgacaactccgatgtagtgcggtacctaactaacaaatgtgatgctggtgtcaaaacccgtgacatgaaagaaggcactgcgttgatgcaggccgctggcaacggtgaaattgaagacgtgaggtatctggctgagcaacgtaacgctgatgtgaacgccgtggacgccgaaggaagtacagcattaatgcgggctgcccgcaatggccaccacgatatcgtgcaatatctggttgaacaacgtctcgctgatgtggccaccatagataacaggggatacacggcgttgatgtgggctgctgccaagggtcaaatcagagtcgtgtggtacttggaacaacaatgtatggatgatgtgaacggaaggttccacgagagggcctcacaaatcaccgggcatatgggagtggagcactttctgatggaatcacgcactaataataaaggcggtttgtaccaatcctgggatgcggtacacttacgtaaatagagacggtgagcactgttacacttaacttatcactaaagccgtggattacagcactactgaaaatgaacttttcactgatgccatatcaacaagattctaataataaataagatagggctaaacatctcgacaaccaccgctattttgcaattgccatggcgaggagcacacagggccggcgtgagcggcggccttggcttgagctctggcgtacagggcccgtacgaagagtttgaggcgggcttaccaacatttagctgaaaaaaaaacgatctagtgcgctgtacgatgaaccatgtcgaccgtgaagaagactcgctggctgtaacgcaccatgatatgcggtgcctgatgactaagtgcaaatccaagcgctgtgagatgtccggtgaagcctgtccctgtcgctacaaggtccttgaatgccagggaattccagaagtccaggtcgtggatttcaagattttattttcgcaagcatacaatggctgccgacgcaccaccgtctccggttagcaccaagctttctacggctatgaaggagtatttaaatgctaaacttgaggaaacgccatctatggtggctcaattggcattttccttcctgtcacgcgaggtccgtgagcgccgaattgcaggttcagccccagatctcgagaaggtgcagaactatgtgaagtcgtggcgtgcgaaaaacaagccggacagcatggcccccgtcatggagatttgtattcgctcaatgtacgatcgtgaagatttaagtcgagcacctgtggatttgctcgtgttttgtgattcgaaagatgaggacggcagtaggctaccattgttgggtacgggatcggaggcggatccttttcgtattggcttaacaagcctacaactcatggaacgctacatcgtcgttcaaaacgatcctgatctcactactttgattcatttggattgtacacatggtgtggtgaaacagaagtatcctgtttttgttgtgggcatctcggattgtgctggtggattcctacccatcgtttactactgcgcatctcagcgtagaggcgtcgacatctcgtggtgtctagcgtttctgaagcgtgtggtgtttagcgagattcaggtccgcttcaagcctgactttgtcatgatggatgctgacaaagcccagtacaacgcgtgtgctgctgagctacctgaaaccacagtgcttatgtgctggtttcatgtcactcagaatgtgcacaaatatgcagatgagaatggtttggatggggtatctcgcccgttgctttttcgcaatctttatgatctgcactttgccccggatgaggatagctacatgcagaaacgcgcttttgtgatcgcgtcgtggaatggtgcaagtctttgtgtccccgattcaaacgtgtcgcgaagcacattatcaagacgtggtttttggatcctcgcttttctaagtggcaagcgtatcacacaccgacggggtacgcagctacaaacaaccctctcgaaacgtaccactacactttaaatttagtaaacgacagtaagcgcgcaaacccgacagaactggtgggccggctggatttgtcgcgcattgcccacgagactagtatggtgccattcagttcggcaccgaaagtttcgaagcggttgaaggcggccttcaatcaagccgagaaaaagaaaacaatgagagctattcttgtacaccgcgtacaaaaccgtgatctggttttggtgagtgttgcaccggagcccaaacagagaacgacagttgaaccggataccagcgttgttgaggatgccgctggagcccttctatcgtataaatcggtaaactacaacaggatcatgtggaaggagatgccgcaagggggctgggtggtagatgctacggcccgaacgtgcatgtgcatagtgtggaggaaagcgggtatgtgctttcacgttatcaaagcaacaaagttcgccaatctgccttgtcctggcatgccgcgaccggaacagagatttgtcacaccctaccagtcgagaggacgacctcgatcgccgagccgtgtacgcgtgcagagaccagagccagtgtcagaggaggtgccggagggcgcaattgttctcggcttggcaaccttggcagagttccgagctaactcggcagggtcaagcggacccgccagcgttgagctggaggacggcgaattctttcctggcgttcccgtaacaactccattggcacttgcagaccacgcagataactctgcagtgcccgtcaccacctcgtgtgtgcatgccggtgtgttcactggcgtgccaagagagcgcgcatccgaatcgcgtgatccgaccaatcttcatatgacgggtcctgcaggagatcccagttcactaggtgtgttggctggcacgctgagcagcggatcggaactacatgaagcaaatgctgaaggatccgcgtcacttcgacgctccgagcggcgccgagcgccatcgcgacgcgcccgtgaggcgtccagcgctaacaagcgcagtcggcagtaggtgaagtggcgggcgttgttgaaggtggcagtaaggacaggatccatatgattagcataaatcagacctattacataaactcgatcaataagtcatcttatccattgattcgctcacttttaaaagcgcggtagagagcgggagaaggtctcgatacgatggaggcagtgcatcggtgccgacctgcaacatggtgaactacgacgaggtacttatccgtgttggtgctgcttgagaccatccatttggttctgacaaacggttacatccaggacgctagcgcctagcagaagctggactcccagatcaagaccatggcccctccgagacgggcgccaacgcagtgtgtctgtacgatgttgatctgtccaagccgcacgccgacttcatgtacaaactgcgcaagtacggcatgctcgctcttgtggacctgggtgccacgtgcgagaactgttctatcaggtggacgagtaactaacaggctacactgggcggtagttcacctccttgtgatcgacgccgccaccatcaccgtgtgctagacgaagttcatccgacacacgcgcgccttcatcggcggctgctcgtccaccatcggcggctgctcgtccaccaagctcagcatccccgtgggcgtcgtgatggccgacccggacacgaccaacaacaaccgccggctcaaagcgcagtactacaagtgccgcacggacttgagcgaagagtacgagaacgctgagcggtacggcctcaacacgtatcagtactgcgacggagacgtgacgacgctggcggacgccgacggcttctcggagctattgacggacttcaccaactacagcatgtccatcccggtcatgctgaccgagtacggctgcgtgaacccgagcttccccacggtgggcgactacgaggcgcagcgcacgtggcgtcagcctggctggctgctgggcgacgacgtccgcaaggtcttctcaggctgcttcgcgttcgagtactcggccgagatggccaactcggtcggctcgggctcgtccgcttcggcgtatccgtttacgtcctacggcgcgcagaactacgaactgggctactactcgcccgaggacatgcgactggatcgacaccatgtgctcgtacaaccccatgcccaacttctacaacatttcgacgcagtacaatgactcgggctttcgtccgagtcctcgtacgatgacgtcacggccgactcggaccgctccagccccccggacttcccctcgggcttctcggccctcgtcgactcgacgtgggaatcgaacagcgtggaggacgagtcgtgaccgtccgaggtgctcaactacgggccagacggtcagcgactggaccagccacgagggcaccacgtcgagggcggccagaggcgactcgtcggattcttcggctgtcagcgtgtccatggcctcggtgctgctgctgggctctgtgatcgctacgctgctgtagacagcggtgtcctactcaagtgccagtggatggcagacggagacgtaacacgcagtgagcgctagtcggcgacagatagccggtagagaacagataatgaacaagctgtaaagagattgcattctaaccgtacgaaagttttgtcgagcttcatctgacgcagtgccaatcggacttggggaagcgcctcgaaaacgaggaactcgtgcacctccgtcaactttgtcaaccaggcgagcgtgttagcttgtctgtcaatgcgattgttgtcagttttgctatggtttttcatgcaccttgataagtaggaattgacaaagttatagtgctccactccacttcatcagtggcccgagttagtaacaaagtgcatctgccctattccttggttagtgctgacctctattttttttgtgctcttttccgaacccatagttggaggcgcaaaagtcaaagtacagctggtcgtatacacagtttttcgagcatctcctcgttccacgagcgatacacagagttaacggaggccattatgaagcacgaaatcgacgtcgattggtacgtggttgagcaatgccccgctgatgttagcgatgggatcgtggaaccatacatagcgttcatgtgggccactgacaggggccacattgatgtcctgcggtacctggctgagcactgcgacactgatgtgaacgccacgaacaatgagggctacacagcactaatgatggccgctacacaaggaaggattactgtggttcagtgtctggtcgaacaatataacgcagatgtgaacactgtaagcatcaatggaatgatcgctctccgactcgctgctgaacgtggataccaggacattcaacgaatgctcatgccattcattcaaatcaaagtccaatcacccaccgccgacgaaacgacaaatacaacaaccgtagcccacgttccgccaaattcctcaattgacccgtgcgaaattcgactcatacggtacagtcaaaacggaaagacttccttgtcaagtggctcgatgccgacgcagtcgtgaagctcttcattcccgacgcttctcattcgtcgttcggcggtgaagttcgtatgtggcaacagcttcgccaccccaacatcgtcaaactatacggcgtgtgtgccgttaattcccacctacaatttttcgtgtgcgagtatgcgagtcaaggctcacttctagaatacgtcaagtctccagccgagaagcgaccgacgatgtggaggtacctctacgaagctgcgctagggctcgagtatcttcacgagagaggactcgttcatggtgacttacggtgcagtaacattccgattgggagtgatggcctggcgaagctatcaaactttggactgattagatctatcaagacgtcgaacgcagtgctggataggtccgtcaggtcgatgcgctggcaggcccctgaggttgtgaaagggatgtctccatcttttcaatcggatgtatactctctgggaataagcattttggaagctgtgacgaaggagactccttagcggggtcgcgaggccggaagccgtagtcggcagtggtggggttcagcagaggccgcagctcggggcgctgggagcgcgtgggagccatctgcgccgcaacctgctcggactgagtttcgtccaaagggttggagatgacggagcccaggggcacgccctcaccacgaggtggcgaataccgtggctcagggagcgcgcgcagctcgtagaggccgaaagagcgttcagggaacgggttcggagtttgcagcggtggtcgcggctcctccttcgacggcgcagcgcgctctgcaggtggacggctcggcgagcgcacaggagacgtgtgcgcggggcgcccttgatcgcgacggctcggagagccaactggggccggtgagccttcttcacggcgtgccgacggtgtgggcgaagcgtcgccgcggctcggggagcgccgcgtgagtggggacgcatctcctcggttcggagaaccctccatggactcgtccacctcgccctcttcaccaaagagctccttaggatccatgatctgacgggttggtgctcgaggagagctggggcttgcacgctgcgagctacgcttcaggcgttgccgcgaagtactcggacaccgagagcctggaagtcgtcgagggtgtgggcgcgggcgctggcgttcgcggaggtgcggaggcacacagtgcagcagcacgagaggagcgaggctccgaggcggatctcgcgagaggctgtctgcggtcgaaagaccaaaaggctttatgacttgaagtcatgtgagggcgcgttgcgccgagaagttctcagagaagtccacgcgatgtggattgactcgttcgagaaggaggcttgacggaacaagacccggtggttgaccgttaagcgtgaacacccgtgtccacggtttggtgggggagggtgtaacggggttacacgagagttacccgaagggttacgaagtgggtacacactgtctaagctaaatcagtaggagaatcagtacatggcttcagagccactgattatgcatatgactagggttcactatgctagatagtgaaccggatacatttacaccgtaggcggctttgccgcaataaaggaaaatacattcagtttgagattcacacagttaagagttaagggttgactcttgagtccgtaaggtgaacggactcgtacgttctggtattagaacgggctatcttaaactgagactctgcgagtctgataagcttcctctgacgcaaagctacggcagccccgctgcacttattagttacatcggtccgagctgatatgcctcgctcgatcgtcgtaacatccaactggtcgtcgacgaagagcgtgctgcttatctaggttccctcgccgtgttggtgatgccggattttgactgggtccagacagcgggcaagttgtctttgaaggcagtccatatagcaggctatgtgcagaatggatagaattgagccttgacctattccaaactcgcgtgctccagtagagatccatccaaaagccgtccttacatcgacgtgaccagggccaagaagatcaatcatgagttttctgggaatctctggcacaccaatcccccgatagataagatcatgcaccatttggaaatcggtcaaagcacttcaggcagtctttggattccattatcaagcgctcacgaagatcttgagcacgttacgtcagtaaagtaacaagtagagctgcatcgacgacggttctatccgattgaaatccgtgttgcatttggctgatcggaataccaggctcaacgtagcgtttcacaacaagaaataagcggctagacaacgccgattgcacggtaatgggcctccaaggtggtagtccttcggagttcgagcgtcgggtcgatgttagcgcacttaggaagaaaaatcatttgcttttgccgtagaataggtggagctctgcccaaacggaggatcagctcaattactcgcctctcgcgacttcggactatgtcaggtgcagcaatccacatctcctgtgaaatacctccataaccgggcgctacatgttgcttcagctgacgatagacctcggcttgcatttcaggcgtgtagacatagttgttccacgccctgctttcatcttgccaatatgatacaaaacggccaccctcaatgatatccggaacaatccattcacgagcgaaatcgggtaggtcctccacatcgtccattgacaatgtttccagataccgtggggactctgttttttcgttcgcagggatccagttatccaggagagtagttagttccctctgcacctcactccgatcctcagcgtatcgggtttccccagtgtccgtgactatcgcacttcgtattgctacgggcggagggcctcgacctagggtgctgttcaaaaacttttttatacctccgccggaaaaccagtcctgtcgttgcttctttagctgagctctgatttgagttgatctccagtttcttcggatccgcatgactcgtttccagcacttaactacactcgagacccacatttgccactccgctaatgttgctgtcggaaccactggcatccgctgtagttcttcatgcaaatgatgtgtcgcgcgctcgtgcgcgcaccctgccacgagatggcctggctggattacccactttggccaaataattgcattcgcagcgattaagaggccatcgacgccgacatcatccaaaacagacagctgggtcagctttcgtaattgtgccgtgcaccgattactgtatttgatgcaaacagagcgcgcaagtagtcgccgggactgatttgtttccccccataattcttttgcgctcgaatgcaggcagtggtgcatattctcaatagcccgctccaaccaatctagtatctcgtcgtccgtgctgctttcggcatcgatgtcgtcgatcagagagagtttcttctcagcaaataaagctgctgtaacatccttaaattccatcatctcttcactagtttttgtcctggtgttgattacagcgatagggatgacaccacgtatcgtcgatagcactcgtgcaccgcgttcccagcgaagcaccgcgaacggtgttccaacatggtcattgctcctaatactatcaagccatattccactacttgtcactgcagtttcatgttccccggagatgtatatatcatcaagtgctgtttttacgttccctcgagcatacgtaaacctgctcatagtggcatgacgcgctcggaaggtggagactaacccatttgaacgagtccattcggagaatttcttgctcattgctttcgcgcggtttgaccgatctccatcaccttgccgatccatcgattcgtcgggataagtattgaagtcgccggcaacaatgactactgcactttccactcgagctcccagcacttgctgttggacccagttccactctgcctccgttgcagcctcgtgacgctctagggagtaatgaatataggttccaactatccatacacttcgtgctcgagctaatctgagcttaacgcacatagagcgtcgactagatgagtagcagatgctatgtttcactaatctattctcccatcgttcacgaataaagaccatggcgatgtgcttggtgccaacgagtaatatcccggctactttagctgtctggtcgtgggtgttgagccaaatctgctcaacccgttggctggtaagatccggatcactgacaacaacaacatcctgattgtttgccaccatccacgcagccagctcttcattcatcttgcggcgtaagttccgatttatattggtagtgcagacacgtatcgccttctcatcgctccgaaaagcgttgtcatcatcacccatgtagtcgccagagtagtgttccctctgcaatatgctgcgtaggacagtgcttcgtgctggttcacctgtatttgcccatggcaaccgcaccggctgccatttccgacggcgcctgcctccccgctgatgacgcgctgttgtatgcaggccggccgcttgttggtctgcaattaccgacgcatcggtatcgctctctatactggtttccgaggtatacacgtcctcgccgccgacttctcctgtaggaattattcccgttacgcaggtcacatcttggcgtgaccgggctgaattcaccgtagcagcaccaatcatttgcacaaccagcacgattccagtatacgtcctaagggagaccaagcctactggcgcgctgggcttcccgatccaaaattctgcaagcgttttccgagtgaagtcatttgttggtccattctgtcccccagtgccgccacggccgccttccagccggatgtaaactgcttcaggacgtggtcggttcgctgctgctgcttgtccagtttgtccagacggtgttcaatgtgctcagttcgtacgttcactaactccgccagcttggtgtcaatatactgctgcacgctgagttgctcgtatgtagctatagcatgttcactcgggcgggattcctgttgcgcgaccggctggacccccctttgcaatagctgattggatcgtttgttggttagcagtggacattcaaacttcaagtgaccgggtttttcacattcgtggcacttccgcggccacttctcctcccactgtcgaagtgacaaagcaatagtcttgaacttgaactgcgtcgtgccctcggggccaaatttttcagtatagctttcatctgctcctccgatgcacacacgccgattccaaaaagtggctgactgcctctgaactcaacgcggactttgccaagtccagtgtcctcaaaaacaccttcaatgtgtttcggtcgcatttcgattcggacaccaaagatcccaatcttgtactcctgcttaacactgcgttgttggccaggacgatacatgacccctaggtcaggatcccattctgcgtacatgataggtttgagcagtagtgtacttgtcgggttgccatgctgataggatccatctgcctgcgagccaaggaaggctctgtatactgcattcgcagtgtcttcactcgggaaaaacagtcgaaatgcgtatactatctctggtgtggtgtacgcagcaagctgctgacactcgcgcgcacaacgtcttccatcctgtcgtacaccgttcttctcagcaaagaatccgtgcgattctacgaaaacatcacgcgccccccactgccgcagtgctgcgagtagttgtccgaacgaaacgcggttacagttgacatactccagttcattcagcgtaaggttcgtatttttccgtccggtgaacagcggctgcatccaaatctgcacccccttgacctctaaaaatcctggtttcagcatcaaccacagtgcgcggttcaacttgaccgggatccctgtcagagactggtgacgtgcttcctgatccttcctgcccctttcttcacgctttcgacttcgctgagtttgttgtcctcgaaacgcactccgttagcgcggcaggtttccagaatgtcacgctgaaagtgtttgctatacattctgcagtcgtcaacgtaaacgtagcctccggacatggagaaagatatcaccgtgttggttgtctggaattggtgcggtgcgcgctcgctgtcgtttcgtccggcttccggcttggttctcattcatttgccgtccagtcgcttgaccgtcttcacccatgtcaatgtcagcacccgtgggcgctgatccatgccaactcgagctctccgatgccatgccgcacacgcacaatggctgcggcgtctccgtatacaatcttcaaaatattccgccccatcgtctccttctctctctccttggtcgacttgtagccagaccgccttcggaccccctccccacttttgcttcacaggtcttattcgggagtccccgcccagcttgactttggcatggcggtactggatcggcagtcggtgttcccgcttgcgggcgtcttcgtccttccacctcgaggcgatttcgccgactttcgtgtcgtagaggtctcggatgaactccagcaagctcgagtcttcgtcgtcctcgtcgtggacgggctcgcttgttggggggcagctttagctggctgaacagcctaaccaattttatttcagcggccgggagccccccccccaaaaaacaaaattaattggcaaatgtcgcctgagtccatagtccacagattatggctaccgtaacatcacaacgtttgtacatttcgtggctggttgtttccagaatgtcgactgtatccgtagtgtgtatcacacactgtagggagcagttcttgaatttatgaaattgttttggaaaatcataactaggatagctacatctccttataagctaacatttactcaaaatcatgaaaataacaactaaagattgctctttttcctgcgtctgttcgcgccaatggctttggcttcgttttgccccgctctaaattgattaacccctatgaatccttcttgtgtaaatttgtatagctggaatgaatgacgtcaacgcgctcggccgggggctttgcccccggccgagcgcgccattaacttcattcgtgtattttgcacggcaacgtcgccattttttgccaggaaggcgctacactagggtttgaaaacttgccaccaattttcatgttacaatttcttgcctaccccaggtttgcacacaaaggaagtctacactgtcctcccagaccaaagcttcgcctctagtagggattcgttatgtatccgttgttgattattatcatcgtccatgggcccaacatgcagatacatggatgtaggcatagcaagttcggtagagtgatcaagcaagacaaaagagaaactgatgaaaaaaacgaattttgcttgagatttgttttgtagcttgtagaatatgcaaatgccctcctttgttcgtcagtgctattgtgcagcttgagagtccagtgtggcatcgggactttttagaagcgtatccgttaagtgtcaggggcctatcgccgatagcagcgctaacgttgcttcctatcccagtaatatagttccgtattgcctgtcaaatccatccatactgtaagtatcctattttccctaatatgagaaccaacatcggtagagcaaagttgcgtcgagttccgggtgacgggagttcgtcagttgaaggcaatagcaaggagggacaagatgagtccccaaacggttgagcaaggcaagttgatggaggactgtactgacagttttctattaatccttgaacaaccaggacaagtacgggtatgcagcatgcagctaccaagagaatcgccattagtggtgatgatgaaatcttctttaggattttaatggctatcatagtagttctaataaaatcccttctacactcctatttcccctaatatgaactccatccaatccgaagatcagtcctaccacttttggatagctcagcggaagctaattttaatgagagtggttggtgcacccgtctactggcgtcatcttttgaacggcgccgttggaggccataattttaatcatggaaacgtacatgatcggaaaacatgattttgtccaggattggtaagaaacatttcttaccgaatgagggagaaacagcgcgaccaatttagcacttgcgacgctcgcggaggaggcgaatgcgattgattctcgttctgaggagtcggcgtttcccaatcggaggttccccgtgaagatgccgagcaacgcacgcggaagcggccaaggcagtgaggcctactgcgaaggccaaggtgaagcgaaacaggatactggaaggcgagagcaacgacgctcataccggggtccggggctctgtatgacgccaacttcagacgcgaccaagagcacgctcgacgacggagaagggtgtgaggagaagagagagcacgacaaagagcaagctccgatcatgggtaactctgtgggcagtgatggcgatgatgagtacgatgctgcgggggctactggggtcctgctagtggggtgtgcgtctagccgcgatggtgacggccacgaagaacacggcggggacgacagtgcggcaatctctgtaagcgtggagcctcctttgctctggcacacagactgggctgcatggaagatctatttggctgagtactgcgagcgcactaagcaagtgttgcccgtgaaagagaccctgtctcgtgcagagcgtatcaagcgcttaaagtgtactaagaaaggaaaagaagtctctatgaaagaaaacgatgactccctgttgctccccgaggcgtttgacccgtatcagcggacttacatttgcacccacggttggaaaaagaggaagtcacgcagtgaaggtagtcgtccaaagcagcacatacggttgacgaattgcccgtttagattcgtggtacagtggaatttgtcaaggggcaagctgcaagtaaagcttggatgctttacccacaatcacccggtatcggctgctgcctacgcgacgtatccgatttctcgtggagttggcaatccacttgtagaagcacgtgtggaaggtatgttgaccgtaggtgcaaaacgcgctcgaatctacgactatcttctggaacacgatcagaatgtcatccaagttgatgtggataacatagtgcgtgagcataaatcgtcggtgtcaagtgttgacgataacgaagctaccgcgagagaagtcgcgactttcgcagcagctgatccagagaacgttgcatctattgcagatactgatgcaggtaaaacgggtgttatatcgctggcgagtgcacacatgcgccgtgtatatggccgatttagcgaagtgctgctagttgattgcagccacaaaacgaatcggtacgtggatttgtctctctactgagactatgtaacaatgatttataacgtgccttacctgccattgacgtcttagctacaactaccagctccttactttcatggccatgaacgagttcggcgaaggcgctgtggtgcagcagtcgctgctcgaggcgaatggagattggcacatggagaaagctatcgcccactttaagagagcccacccactacaaggctacgcacaaaacactgaagggcttgtgtgaaagaatcggtctgacggtttttttcgagtacttcgagtaaaattgggattcgtgccaagatcgttgggtgatgtatcgacgcgcagatctgccacacttgaacaaccacaccaataatcgccttgaaagctttttggaaagtttaaggatggattaggcagctccctgagtatgtctatgtgcatgaaagctttggtcgcgtatgaccgtcgaatgcagaacgaatatcagtttcggctatctcgaattggccagttcgtgaacagcaactatgacgaagagatgtccaatgtgcttcgctttactacccactatgtagccaagcagattgaatagcagtacgctcgtgcattggacaatgtttcaaattacacgtttcgtaaagatcacggcgacccgagtctagtcgtcgtgtacggcatctcttctgagtataggcttagaacggacgactggagatgtgattgtgggttctcgttatcaatgcgccttccgtgtcgctattgcgtatcgcaagagcaaaaatttagctggcccgctaaatccctggagccgtatcgacaagaggtacgatcagactgacatcacgataataatatatcctaaaaactcatcagccaattgcacttgcaggtggatgaactcagaccggaaactggagaaggtcagacagttctcctatgagaagttcaaagatgccaactcgggtcgccgcgagcaaagagtgaagacgcacgcggagcgctacagagaggctgtgagggccacacatctgatcgcaactgagatggcagatattgatgatgaaagcgagtttgaggagatgctgcagttcgtgctaaaccaatggcgcaacgtacgccagcgtaaaatcgccgatttcgagcaattgtgcgtcgatgcggtttccagtcctcacgtttgaccaccaccaaaacgcaatagatgaggatgcggaagccaaacgcgaattcgaaattagttcaagcgaagaatccgatcagtgtctagaagtggagaataggtcatcgagttgtgatgtgactggatttagctctgtgcacgtacgactgaatcccaaggccaggaaggtaggggcaccacgaaaactgaaatccacaacggcggctggtgagaaaggtgatcgaaaatggttcgaagccgctgaagcggggcgtaagtgtgcaggagaagttacattagtggggttgctgtctgcgctggatcgtgagcgcccaactcttgtagaaactcacctgcgtctgtccgggatcattgtcaagtacagcgaggcggctaccaagaaaccgaaattcaaacgcatgaaaaatcccgtactcatcatggccgcgttctacattctcccctcaaagctggtagaatcctgtttaaaggtgctcccactctctaacactaaagacaccgccatagccgtggacgttagcttggaaactgacaccaaacctcgtagcaaggaaaacggagacggctttattgatacggttcagatcaaagacgtcgggaatttttcacgcatgcagatcgagatgttcaagaaagcaagatctgaaggaatcggtgcaacccggagtggacatgcacaagtggctcatcggaaagggactgccctcattgcctgctaaatatcacgccttggcgaacaaagttgcagctgacgtgttatctgcgtatccgcgcaagcaaatcgacggcctccccaattttcctgactttgaatacgctatgccttacagagcgacaccacccatgtggctttgtgatgcatcaatcgcggcgttatgccatcgactacaggatgactttcctacttgtagatttgctggatttcagtcagctattccaagcaaaactcgcatgagacgcagtgacgcggacctaatcgatgtttcgatccacgcgcgtgttctacagtaagtccatgcatttggggtagacgtcgtgctgctgccgttgaattttccgaaggcacactggtgctgtgtgattatcaaggtgacggagaagtgtatactttactacgatccgctgaaccaagtttccttcatgaatacagcgaaggctgctgccacgcagctgaaaattcgaggcctgcaagattacactgtcctcgctcagtgtaggccaatccaatttgacacgtttagctgtggtgtatacgtctgctggatgtttatccaccagatcgtcggtgggagacaactggacatgagcaacacctctctgacaagacgccgattcgagttgctctactatttgctatccggtcaacttctacctctgcagggtttaatgataccggatcgcatggaacacgacgacaccgaggaaaagatacccccaccgtccgaacatgcctacatcgatgacgaggaacttcagccgtcagagctcgcgcaaaagctagtgccatgaccacgtgccctagaggtttctcaaagcttagcactatcgccacaattaatacatgtaagctttgctccagcttccttagagctctgctcattgagacgtaacgattgggatgacggcagtcactctattttccaagtatcaaaccagtatttgcccatgatttctcttgcagtaattctgcaaagaaaggagaaccacacgaagggtatcttccgcgtcctcaacgtatcttctccaatcttcctcagatggtactcactttagctaggaatcgctcgtccaggattaatcctgtacatcgtcatggacgtgtccattactataatcctggcctccaacacctgcctcttttgaatcgtccgctccagtaccctaaccgcggttttgagatctatccgaacttcgtatacggtatactttctatctccaaccacccattcataaatctgcagcgggctcaagcatttgacccccccccctcgccgtgcaagcatggctgcttgtgttctggggaaaaagcgacggccacccggggcgccaaatgacgccgaagctgaccttgatgctgacgacgcgacaggatgctctctctcggaccgcgtcgttacgttagacccgagtcatgatctaagtagctcacacggcgacacaggacccccactggaggagacccagttcagttcctggaaagcgttcgaggtgtacatcaatgagtatcagtctcggtcctatcaagcaagttcttgcattgtatctacaatacatgaaagcgatggtctaactgcgatatgtgccagtagattttccgcatcagaaccaacacatcggccgccgagcgcaacgcaaagataaaaaaagtccaaaaccgggtctggtacacccatacctgacagttttggcttctacgcgaagactcttgtctgtacacacagtggtgagttcaagtctcgcgggcaaggaaagtgactacggcaggaatcaaggcagacgggatgcacagcacaggtaataattgtattttttttaagtgtatgctatccattatgctgccattcggtctagcgggcaccactagcgccggtcgggttctacatgcatccgtcgggcaccgcagcggctggtcgggcactgtggcagctggttgggcactggtgggactggtcgggcgctggtggtaacagttgggcgctgatggcatcagtgtgttatatgtttagagttattaatactattctagctttggatgtcctagttctgttttaacgggatttcgtgttgtattggtttggttagatcaacgcgtgtgttagagttgtggatggggaaacgctcgctgttcaagttactacaaagtctttagtgcacaaccacaaactgacgaaggagctgtatgatcagtatgcgtcggtccggacagccatcgcacccgccgttctccaaacggtagatgtgttacgaaaggctggcgcaaagaaatctggcattcgcaaaaacatcctcgataacactgactgcaagcccaccaaccgcgacgtgcacaacctcgtgcacaggctgaagaagcgagagaacgctttaggtcggacgacaagtgctcaacggctgaaggcttggatggctgagtttggagaagcggacggaaatgttggccgcatctttatcgataggtctggtgaaaaggtacgcgcatgccctaatgaaacggagaatatgcttaattttaacaacgtctgcgtttatattttttcaggctgttgcaacttgtatcacacttcaaaccaaacaaatgcgagcagtatttgaccagtttccggaagtgattttgatcgataccacccacggtaccaatgccgaaacgtataagatgttttcgttcatggcccacgatgctttcggccatggacaatttgtccagcacgctcttatccagaatgagcggcgtccgacgcttctgactgccattgaagagttcaagaagaataacccaggttgggttaaaatccagtgtattctgatcgacaaagattttacggaaatgtccgttctgaagactgcatttcccgacgctactctcctgttgtgccagtttcacgtgctcaagtatcttcgtgaggaaattggttctgctgactacgggctctactcgtggcaaagagagcaactgcgctgtacaatgagtcttctggtgtacgctaggacggaactagagtacgagaagtatcggagatacatgcggtacctcttgaaaattggccggtgcacagttgcggcggcgcttccagcaactactagcacgagtactgatggccagtccgagagtaccggtttggctcagaaccgaagccgtgatgctgcattggaggacgtacttgatgatcaagacgtggtttccgacgaacacatgcagcgaagtgcaaatgcggtcgatgattcttgtactcatccgtttgaagagtatttcaaacggaattgggataactgccgagagctgtggtgcgcctacaaacgccagaactgtgttacgttgggcaacaacacaaacaatcggcttgagtcgtcgtggaaacaactaaaagattgggtggattctttcatggatatattgcatccatcatgtactaccaaagtctacaacaaaaaagtttcctctctcgcgtttttaaagtgtcgaccgttcataatccggagtatgatcgcgagatgtctgtcgtggccaacagtgtgagcgagcacgcctgcaagcagatcttcactcagtaccagtacgcatgtcgccgtgatactacctaccggtattacaaagcatttcctgacatctacttcatcaaaaacttcaagctgctccagcacttcgtttgccagggccacgtgcttggcccctgtggtgtcatctgtgagctcgtccgagtccgtttccacgtcgaaaagctcaggattgtccgtcattgcgtcccatttagtcgacagtagccaatgcacatcctccttccacgcatcaagcttgcggacaacgttgtaaaactcgctcatcctgtatattgtggtgttgagcagtaccaaacatcaacacaaagcataacaacataacaagcaacattgtgagcaccgcatagtacaacataatgagcaacttggtgactacaaacctggtgaactgcggggttcctccggggaagtaggcgatgatctcctcggtagtgctcttcggatgattgtcgtccgcggtttggttgaagtacttggactttgatcgcttcttcttctccgctttgaccaatgtagcgaggatgatgtgaagtcgtacaaaaaaaaccagtggaccccagaaggtagaaacagtgactacaggtcacctgagtgtcctgatgacgaaacttgtgacttagtgtggaaaatgtgctctcacgaccgccacaagcgcgcaagtctgtcgtcggtcgtctgcgaactcgaatgtttggctacgaaggagtatcccagtacgtcccaacccgaactggaacggctttgctcatttgaagaatacgagtatggtggagttcaagaagcatgggagcgcctagaaacatatatgctgacgtgcacgaacaccctatactgccgtgcattcgaccaactcaaactgccacgtgagtacctacgagtatctgctcaccctccagcgcggctgaggcgttttcacgcgcttgtcaccgagttgtatcgaacggtcaagatgttgcctgatcaagctaagatgatgcgcttgtcgtcaacgcgcgccaccagtactagctttcacgcgctgcagcggcgcatcgagtcgctcatggcatcactaagtggagaggtggaaagtcagacgggatcaggatggcaacaacagcgccgtgacgagaccagatcgtgtgtggcaggactatccgacacctatcttttgctgcaaaaattaaagacggtggaggaaaggttcgcatatctgaagacgttgaaggccgagattgaaaatcctcctctaggaaaatacacaccggacgagctggatctcatgaagaaggtgtatgacgatatcaccggcaagttggagacggaagattggtcggaactcattccagagtggttcatcccctggtacgagttgatcgttgacgagtggaattgtctgggcgaaggaggctttgggagcgtgcaccgagcgaagtggctggactcggaggtggtggtgaaacgagtgactttgccagggtcgggtggcagagcggatgcttcagaatcttggtcgagtttatcggcgtcagaggacccgtacgctactaaagccgatacggaccctgatcagaaacgcaaagctctcgagatgttccgtcgcgaagtcggcatttggttcggcttcagccatccccatgtcattcggctcttcggggcctgtcacgtcggacgaccgttcttcgtctgcgagtacgctaccaacgggacgttggtgaactacttgcgaaagcatcctggcgagctgtggtcgaagctgcatgaggctgcgctaggagttcagtacctccacgcacgcggagtggtgcacggagacctaaaagggaacaatatcgtgatcggcagcgatttcaaagcaaaagtgacggacttcggtctcagctctgccgctaacagcgaatactcggctccgatttcaggtgcgtggcattgggtggcccccgagtgttttttggccagcaacgcaggagaagcccagcgacaagcgaacccaaccatcgcgtcggatgtctattctctggtatgtgcatcgtggaagccatgcgggtcgtggaggcactaaacgctagccagcttgtccaccaccgtcgatatcttcagccgcttctgcggttcgaacgcacacatttgtacaaccaaatcccattgactgtcgctacacgcaggccggccaggtagcgtgccgtgagtagcatggtgtctcaccgcgtatcggtccgcaacacgccacggaaggcaatggtcctggcaaatcctggcacctcaagtgacgccatatctgtgtcagaggccttagcagaagatgtcacgagccaggtttcagtccccgagatgatctctgcagctcaggaggaagtggctcggctgcaaggcaccacggatcaccatgatcaactgctgtcgctgtgcgattcattgtggaaacggcttgagcgcgttcatgcacagagcgcagacactgaccgcgaggattgtctctcttcgttctattcgttagttgccgacgccagcgcgtctacggcgaagctcaagcaccgtgaagaaggcgtggtggcgctggctgagaccacgatgcggtactatgcgttagatcgagcgttgaccaagttctgcgaagcccaatttctacttgtagtcgatatgaaagaggaatcggcggggggcgtcaggaataattaactgcacggtggagaaatccaccaagtagtcaagatgtcatcgttgagcgctgcatatctcgttagtatttcatattatcgataggggacgccagtacaatgtcaatagtgtcgatgtcagcatgggttttcaactgttttctcgactgccgtccgcttacaacgccttctcttgagcttttcacgcaatattacgattaacttatacaatgtctaggtcgtagacgtcgcggccggcggtgccatccacttggcgaaaatgctgcgggagctctgggccccctctatgagctccagtgcctcctcgcgcgtgaggttgcgcggcagctcgtcttcacgccacaggaacgcgcgcggtttccggcgtccgttgacttcacgcgtgaggtcctcgagggcacgcacggaatcagcacggtttgaacagagacgcaccacgcgcgacttgccgtcctgcgaacgctcgtagcgcaccacgccactctccgccaggaagtcgagcgactgtttgatgctctcgctgcagagcgcctccgcgtgtgagagctgctggcgcaggaacaattcctttgccaggacctgcacacgccgcacgacatcgcagctgcacctccgacagtttgttcactgcgtccgccgccgtcatcgcctcggggtctcgctggttgaacctcatgtccaaaggtccgtcattgaggaccgtcgcggtgccgtcgacgacgtggcgaggctccgagaggttgcgagagaaggcggcgacagtctcgtggagcaggtcggggacgtgcactggcggctgcgagccatcgctgggggttccactggcgctgcgggaggcgcaagacgcagtggatgcaatgcagcgtgatgacgagggaggaagcgtcgcaacgcagcgagcgagtgcaggcgcagcagcacggaatcctacatatttattgccaataattgtgaaaatactgtgtgattggctgaccctatattgcaatgattattactgagactccaaaactaaaatacaaggtatgatattttaatgattacagaattctgcccgaataaggaacgggtgtataactaatagcctcacatatttaatattattttccagtcgatgtggcgatagggggatgtgcaaggtactgcaaggtactgaggtgaaaaatccagtgccaatcatccaccctcgtttgaaaaatggcgcgcatttagcgatcttactagacttcaaactacatgtatcgtagtggtagactcgcactttttcttttgcacctcaccccacaagcccacctcctcccccactccacccatgaagtccacaccgtccaagcgtctccgcctcatttggtctgagaaagtgggcatcctcgacaaggtgaagggctagataatccctacgaggtctaccagttgacagcgctgttgtggtgcgaggatgcctggtcaaaggttgtgcttcgaccatacgccactgttggaatcattccggactcgtaggtaaagctgctcttcagttcattttgaaattactaaattagtacattggaaaagtatactcaacataacatcaatttatgtattctgcgtctttatatatatcaggcgttccttacccgggcagattactgtattactgagactccaaaactaaaatacaaggtatgatattatattttccgacctctggtttgaaccagatacctagtactgcatcagattggatgtaccagattagtggtacttattggtaatgtcacgggtctctagaacttctgtctcgtggctttagcattttgcgggttgtctgggtgaaggcagcttcgggagtgtgaatcgagccaagtggctggactcagaggtggtggtgaaacgcataacgtcgccaggtccgggtggcaaatcggatgtatcgacaacgtcttggagtttattggcgtcggaaggtctgtcggctactgaagctcatatggacgcagtccgcagaagcgaagctctagtgatgttccgtcgcgaagtcgacatttggttcagcttcggccatcctcacgtcgttcggctctttggcgcctgtcatgtcggacgacgctacaaacgggacgttggtcagctaatttcaagaccatcctgacgagctgtggtcgaagctgcacgaggctgcgctgggagtccaatacctccacgcacgtgatgtggtgcacggagacctgaagggaaacaacatcgtggttgggagcgacttcaaatcgaaggtgacggacttcggtctcagctccgccgttagcagtgaagacacggctcagatttccggtgcgtggctttgggtggcccccgagtgctttccagacgacaaggcagggcagcaggcaagaccatcctttgcgtcggatatctattcgctgggtatgtgcgtcgtggaagcactgcgcgtggttgaggctgtgaaagccggtgacggctcgcgcatttgtctgccatggcgcgttcctgacagaattgtggtgatacacaatgctaatcaaggcaacttgccggcgcggcctttgtgcagcgacagtcaatggaaatgtgttaagaggatgtgtaagttgaatccgaaggagcggattaaaatctcgactgtggtggcagactggcgaactccggcgtcaaaacccaagcgatggccttgaccgacacctcgccactggataccacgaatgaggttactatccccgacatgattgctgcagcccgaccgagggtccagcccaacggattgaaaacaaaagttatctaccacgagctggcgggctctgatgtcctcagccaaacctcgatgctgccagcggatgtgacgaatgaagtttctaaccctggagctcagcaggagactgacgtattgcaaggcgtcatagaccaacatgatcaagtgatttcgctgtgctcttcgttatggaaacgacttgagcgggtgcatgaacagatcgatgacgataagagtgaggaatgccgcgcttcgttcttctcgcttgttgtccaagccaactcgtccacggcgaagcttcaagacaggaagcaagaaatcatggcgctaggtgagaggtattggataatgcaccccgaaaacgccccaaatcccaaagtttttcaaatgatttaagaccatgggaacgttttggtacatatttagggcctggtcggggaacgctcgtctcggctttcgatcgtcttagacgatgtggcgacattttttcttctttttgattggccagttattagctcgatcggctaggttcatcgtctccagactgaccaatctgagacgactaaatcaccagtctcactttggagacgagcgtcttcactgcgtttcgatggtgcagagcgaaagcatcgttgctgcagttgctgcggccacgggagctctcgcgacggcggtccacaccgctgtgtgggcaatttcgaacccaaagcagaacatccttaccctgacaccgctagagttttaggctatgctttacgacgcggtatacgacgagtggtttcgacagaatctcaggtgtagccaagctacgtttctacggctttgtggtgttctgcgtcaggagctgaaagattttgagttagatcgatttatgaaggagcactcttttgaggagaaggttgcttgttttcttttttttctcggctcgcagggtggctatagagaaaactacggctgcgtttgcaatttcgaagtcctgggctatcgacgtgattggtatatttcgcaaggctttacgccggtcgctgcgcaagttcgttcattttccgcggcatgctcatgaatggacccgagttcaaggtaaattcgaagcgaaaggtggaattccaggagtggtggacgcgatagacggctctctagtggagattaacaggcccgaggactttgagggatactattgtcgaaagatgttcccagcgctaaatgtgcaggctgttgttgacgacaaaatgtgctttactagcgtggagattcggccgggctcgtggtctgaccaaaacacatggcgtgcgtctactttaggctccagcttcaaagactttttgccagcggggacccactttttaggagatgcaggatatgctattagtccggctatcatgacgccgttcatggaaagtgatggagccggtttgacacgcaagcagctacgctacaattatctgcattcccgaactaggatgacagtcgagtgtgcttttggactctggaaaggtcgcttcagaattgttaactgctgcattaacaccaaatgcgtcgagaaggctgtggatattgtggctgcaacgatggttctccacaacattttgttgggtttgaaggatgacacttctttcgaagatgaagatgacgcgcgggtgaacttcgataacggaagattttgttgtaactgggaacaactctgagatgactgcaagctttctaagagatgttggttcgagaaaacgtgagtccattttggcttttaccgaagcttttgagctagtctagaaaacgtgtgtaactagattataatagtcgcggcgaatcaaatccagtagctctcgaatcgtttcattctgcactcgaagtcgctcgctctgagcttgcatttccgacaagagttgctcggtgtgggcatgagcccgctcactttgctcgcggaacagctcggtatgttgctgcacagcagctgcaatgtcttcggcacccccatttcagactgtagcaagtccttggccctaagcttctagcccttcgctaaaccctttagcaaccgcactcaaacccgcctccacacactccccctgggtgcgcttctgtcgcttattagacgaccaagtggagccagacatggtgcggggcgttggagactgaggagggggagatgaggcaggcgtggcgaaggcagcgacgtcggcgctcgcagcatcaccagcagcagcaattgtatccgggtcctccgtgctaagatgcggtcggttgttcatccccgtcgcatcaccccagtagtctttcatgatggagtagtgatttgggcgccgcacgggtccgtcgttgccagttcgaccttctgcttcccgcgcagacgcctacttttgcttcatgttcttcaccttaaaaaaatattcaccgcacatcatgattaataacttagtagtggctcattccgatagatattttcacattgtagatatttaccttagattgacactgctggtcagtgaacacgttgctctggttaacagagagtgttgatgctaagacggcccacgcatatttgatgcgcttggtgtccttcgtgttcttgaagttgtcagctaactctgcgtaacggaggcgaaagaactcgctcacatcatcatcgctccatgatgcagctggcctgatcgaagctcctcgtcctccacgaccaccgcgacctgccccgcgaccaccacggcctccaccatgcgggggtgctctctcgacgccgctcccgttggggtccgtgccgcttacgcttctctcagcagcgtcttcagcttcagcgccgcccacaggtggagcagtaagggtgccttccatagctgcgagttctcgagtgtgatagcgctgagtcgagcagcttgacacaccaaaactaagacggtctccagccaaccgaccacatcggctcggttcaccttaggggtaggcttaccggagacgagcgagactgagacgatcattccccgaccaggcccttaggacagaacaaccttcagtatgaaagagcagcacagcggacactcgcgcgttggctctcgtctgcggacttagcgacgggtctgcggggggggggggggggctctctcgcttcgctcggggggggcgccgctgcgcggcctgccccacccccttgtcccttatgctaagttcctcgtctcggccaggcgcggtgtctagaaaaaaaatatcgggttgcagcactcgcgttcgctcgctcgcacagacacgcccccgcctaatcggcgggtgttggcgattggtgaatgcatcgagtgaggctcgcgctcgcgtccgctcgccctcgcccatagactatagaccataatcagtcaactccgttttggtacatatttgggatagttttacgagaaagcagtcatatacttggccccaaatatgtacctaaatgttacagagacaattcattatttgggacatttggggcgatttgggcacatatttgggatgcattatcagcttccagctgaggccacgatgcggtattacgccctagatcgactcgatcacccggtgatcggattgcacccggagagctttgctgcgctacatattagtttctctctgtaagttcaccgcagcgttgtgcgttctacttaaaattgccgtgcgcggttctttcgatccaccgcgcagcaaatacaaggagctataccgcttccatatcccatgcgtttgtacccgcaagaccttcgcctgcggccgtcaagccggccgcgctgtgtgtctgctgaccacctgctcatttagaagcgtgacagcttcagtgggcggaggtggcgctctggccgaagccgcaacaccttccgccgctcgcctcgcccgtctgcaggtcgctctggccccaaccaacgccactccgaggcccgagcacccccactcttcgtttcgcaacgcagccagcaagccggaccagcgcagatggagacgggggcggaggcggagttcaccgcgtcagcaggagcgggagacctcgcgcgagtccaggggctggtggggcgggtctcgaacgtcgagaaggaggaggcgctgaggaaagccgccgggaacggccgccttgccgtcgtgcggtacctcacggagcagtgcgacgctgacgtcaatgccgctcactacggcgagtacaccgcgttgatgctggctgctcaaggtggccacttggacgtcgtccggcacctaggggagcgatacgccattgaggtgaacgccgcggtctattcagggcgcaccgcgttgatgacggctgctgagggcggccgcgtggacgttgtccgccaccttgttgggcagtgcggcgccaacgtaaatgccgccacaaaagggggccacacagcgctgagcttggctgctacgaatcgccacgtggaggttgtgcggtacctcgcaggcgaatgtcgagctcacgtggatgccacgagccaggccttgatccggaccgctggatacggcgacttggacgtcgtgcggtacctggttgagcaaggtggcgccgacgtgaatgccgcagacaagaacggagacaccgccttgattatggctgctggcaatggccacatgtccgttgtgaagtacctcgctgagcaatgcaacgcgaacgtgaacgccaatgactgtcatggatattcagcgctggcacaggccgcttggcacggtaagattgagcttgtccggtaccttgctaggaatgggaacgaagacacagcaatggtattggccgctgaaagtggccacttggatgtcgtgcagtacctcgccgatcagtgtggagtggacgtggatactaagaccgaggacggagacaccgcgttgcttaaggcggcaacggagggccacatagatattgtcaggtacctaactgagcaatgtggagcggatacgaatgctacaactaggtacggaagcgagacggcgttgatgaaggccgctgcgaacgggaggctggctgttgtacagtatcttgttgagagatatggggccgatgtgaatgcagaaagcgacagaggagaaacagcgctgctattatccgctacgaatggccacacggacgtgattcggtatcttgctgaccaatgcggcgctgatgtgcatgtcaaagaccagtatggcaacacagcgctgttttgggctgcgagagggggccacaaggatgttgttcggtactttgccgagcaatgtggcaccgacgtgaatttaatcggatgggatgggtgcaccgcgttgatcgaggccgctggaaagggccacttgaacgttgtccggtacctcgctgggcagtgcgacgctgaagtggatgccgtgaaaaacgccggatacacagcattgatgcgggctgctgaaaatggccaccacgccgttgtcttattccttgctgagcaatgcggtgctgacgtgaatatccagaaaaatgcgttgaacaatgcgttgattcgagctgctgaacatggaagtatggatgtcgtgcgatgtttgactacgcaatgtggtgctgacgtgaatgcaactgacacaaacggatggacagcgttgatgagggccgctcgatatagccacatggatgttgtccgatacctcgctgagcaatgtgacgccgatgtcaacgtcgtcggcaattatgggtgcacggctttgacatttgcagcagaccacatcgacgacgtggagattttgcgttacattgctggtaaatgtgacgccgatgtgaaaacccaagcttgttctacagtattacggtcggtcgctcaacatggccacttggatctcgtccggtacttggctgaacaatggagagcggacgtgaatgcaacaagccgcgcgttgattggggccgctgaatacggtcacatcgaagtcgtccggtgaatgtggcgccagcgtgaatgcgaaagatgacttcgggtacacagcattaattcgggccgctgaaaactgccacttcgacgttgtccggtacctggctgatgagtgcggtgctgacgtgagtgccaaggacggaagcggagacacagcgttgatagtgtcggctcgacgtggcaggagtgagtgggtacggtatcttgctgagcaatgtggcgctgacgtgaatgccatggacaatgacggacgcacggcactggtgtggactggccgattcggttatatcgatttgagccggtaccttatcgatcaatgtggtgcggacgcgaatgccagggataacgacggaaaaaccgtattgatttgggcagctgaaaatggccacattgggagtgtggggcaccttgctaaccatgtagacgtggacgctagaggcaaccacggggacaccgcgctgataagtgccgctagaaaaggccgcatcgggagtgtgcggttcctcgcagagcattgcggcgcagacgtgaacgtcaagaacaatagtgaagacacagcgttgatttgtgctgctgggaacggccgtatggatgtcgctcggtaccttgctgggcaatgcggcgccaatgtgaacaccaagaacagtgccggctacacagcattgatattggctgctcaatacgggagcgaggctgacatacggtgcctagtcgaccagtgtggagctgaggtgaatgccacaagcaatgacgggtacactgcgttgatcaagaccgctgagtacggccacagggacgtcatccagcaccttgtggaacaatgtggtgccaatgtcaatgccgtcaccgacgaggggtacactgcgttgatattggccgctgaaaagcgccgcatggacattgtgcgctacctcgctggcgaaggtcgagctgaagtgaattccgcgaacagtgctggatacacagcattgatgtgggccgctgaatatggatacctggacgttgtgcagcttctgacggacagatgcggtgctgacgtgaactccacgaacaaacacggagacactgccttgatgaaggctgctggcaatgaccacttggccattgtgaagtatcttgctcagcgatgcggcgctgatgtaaatgccacgaacgaatacggagacacagtgctgatgtcagtctctggacgtggacgcatcgagttggtcaggtatcttgccgggcaatgtggcgctgatgtgaatgccaccgaccgatacggaaagactgcactaagaagagccgcagaaaatgtccacatggaggttgttcgatatctcgtcgagcaatgtcaggctgacgtgaataccaagtgcacagatgggtacacattgctgatgtgggccgctcgatatcaccgcatcgagtttgtccggtaccatgcagagcagtgtggcgccgatgtcaacgccaagagtgatggcggagacactgccctgacgatggccgcacaatacggcaacatgaacattgtcatgtatctcgtcgagcaatggggcgttgatgtgaacgagaagaacacagacggatacaccgcgttgataagggccactcattgtgggcagatgaacgttgcgcggtatcttgcaggacaatgtggcgccgacgtgaacgcgaaggataacaaaggaaatactgcgctgattgaggccgttcgacatagacgcatcgagtttgtccggtacctggctggcgaatgcagcgctgacgtggacgctaagaataatgatggaaacacggtattgatggtggctgctgaagaaaaccaactaactaccgttcagtacctcaccgaacaaagtggtgctgacgtaaatgccaacgataatcacggatacacagccttgatgaaggccactcaagcaggcaatgctgcaatggtccagtatctagtcaaggactgcaacgccgatgcgaatgctgtcagcagcgatggaatggccgcgctccgactcgcttttgacaagggataccatgaaatccagcgagtactcttgccattcattcgacgcgaagttcaatcccgcgccaccgatacagcggcaatcgtcggtgatgtaactcgccttccactaaactgctctattcacccgtcggaaatcaagctcatccactacagccagaacggcattatcgggggtgacttccaggccaagtggctcgatgccgacgcggtcgtgaagctgttcgtgtcagacgcctcccgctcaacgttcgatgacgaggttcgtgtgtggcaacagctccgccaccccaacgtcctcaaactgtacggtgcgtgtgacgttggccttgacctgctcttctttgtgtgtgagtacgcgagtcagggctcactcctagaatatgtcaagtcgtcatcagtggagaaatcggcgatgtggagatacttacacgaggctgcgctggggctggagtatctccacgagcgcgaccttgttcatggcgatctgcggtgcagtaacatcttgatcggcagtgattgcaacgcaaagctgtcgaactttgggctgagtggatcagccaagcgtttcagagtaacatcgggcgaaggagtcaattcgacgcgctggcaggcgccagaagttgtgaaaggggagtcgccagcgtatgaatccgatgtgtattctctgggaatgtgcattttggaagcttcgacgaagaagagaccttggagtggggacggtgaagcttgggcattgaaatgtaaaggatcgtgggccccggaggaaggctatagcaacttctcacccaactgccccctcgatgctgtccgcgagttagtgtgggaaatgtgctgtcaagaccctcataaacgcgcaagtctgtcgtcggtcgtctataaactggagcatttggctaccagggagtattccaccacctgccaaccggagcaggaaccggttttctcttgtgaagaatacgcattcggtaaagttcaagaatcgtggctgaggctggaaatctacatgcagaagtgcgacaacagcgaatattgcgcggcattcggccaactacagctcctacatgaacgactgggggcgtcaacccaccgtccagccctactggagcaattccacgcgcttatcaccgagttttatcagacgatcaaaatgtcgcctgatcaagctctgatggtgcggttgtcgtcaacgcacgccaccggtactagctttcacgcgctgcagcggcgcatcgagtcgctcatggcatcactaagtggagaggtggaaagtcagacgggatcaggatggcaacaacagcgccgtgacgagaccagatcgtgtgtggcaggactatccgacacctatcttttgctgcaaaaattaaagacggtggaggaaaggttcgcatatctgaagacgttgaaggccgagattgaaaatcctcctctaggaaaatacacaccggacgagctggatctcatgaagaaggtgtatgacgatatcaccggcaagttggagacggaagattggtcggaactcattccagagtggttcatcccctggtacgagttgatcgttgacgagtggaattgtctgggcgaaggaggctttgggagcgtgcaccgagcgaagtggctggactcggaggtggtggtgaaacgagtgactttgccagggtcgggtggcagagcggatgcttcagaatcttggtcgagtttatcggcgtcagaggacccgtacgctactaaagccgatacggaccctgatcagaaacgcaaagctctcgagatgttccgtcgcgaagtcggcatttggttcggcttcagccatccccatgtcattcggctcttcggggcctgtcacgtcggacgaccgttcttcgtctgcgagtacgctaccaacgggacgttggtgaactacttgcgaaaacatcctggcgagctgtggtcgaagctgcatgaggctgcgctaggagttcagtacctccacgcacgcggagtggtgcacggagacctaaaagggaacaatatcgtgatcggcagcgatttcaaagcaaaagtgacggacttcggtctcagctctgccgctaacagcgaatactcggctccgatttcaggtgcgtggcattgggtggcccccgagtgtttttcggccagcaacgcaggagaagcccagcgacaagcgaacccaaccatcgcgtcggatgtctattctctcggtatgtgcatcgtggaagtcatgcgggtcgtggaggcactaaacgctagcgaagactctggcctttgccttccgtggcgtgttgcggaccgatacgcggtgagacaccatgctactcacggcaagctacctgggcgacctacgtgtagcgacagtcaatgggaattggttgagcaaatgtgtgcgttcgagccgcagaagcggctgaagatatcgacggtggtggacaagctggccatgctggcaaactctggtacctcaagtgacgcggtgcctctgtctgaggccttggcaatcgatgtcatgaaccaggtgtctgtctccgagatgatctccgcagctcaagaggaggtggctcggttgcaaggcgccacggagcaccacgaccaagtgctctcgttgtgtggctcgttgtggaaacggcttgagcgtgtgcatgaacagatcgacaacagtgagagcgaggactgtctctcttcgttctattcggtagttgccgacgccagcgcgtcgacgaagaagcttcagcatcgtgaaggaggcgatgtggcgctggctgagaccacgatgcagtattatgcattcggtcgagcgttgaccaagttctgcgaggcgcattttctggttgaggaatcggtggggggcgtcaggaatgagtaactgcgtcgtggagaggttcaccatgcagtcaagatgtcgtggctagtcctgcatatctcctgagtatttcatattactagcggagcatcacggtcgctgcgctcatgttgctttaggggtcgacccccaaaactatgctgaccacagagttttggacgacgtccccacttgaggaatttaagtacaaagccgcttgcaaattctagcgctttatttcccctttcacgctccccgatttgctggctattttgcaaacaacataagtaccattcatacgttgttattaacggtagactgatacacctgacctgtggttcgaatgccagaacacttgtattttacttagtctgcacgcgtaggtagataacctcatgcacgttgagcgcaataaggaaacatatataatgaacgataactagctcaaaataatgtagttgagcccgatatcgtaccatcacacatgcatgtagggtatcaaagcagagctgtgacgcccgagatcgacccaacagaactgtaattgagtgggctaatgcatttgcttagtcgaacatcttttcatgagcaacgcaatgaatgagtgaattaacgcagactagaaaggagcaaataatcggcgcctttagcgtgcaggaaggacttggagctgtctgatttcttttaaagcgaagtagcaggcgagctcgaacgggccaaaagaaagccattgttgctaccaagaagcaccgacacggactccggctcgtacaccccagctcatcgtccagctcgtcatccgtgcatagccttcaatgtaatttagagaagttgctgctcgacagtacccggtcctcagcatgcaaagctgcttgctacttggcgtagcgttggcgcttccttgaggctctgcttgttgatgcttggactctctgttgtgcgctggtcaagcgatcccgaagggccgcagacttcttaccaacggccgcagagcgacccttcttacgacagcataaggtttgaaaggcaaataggcttaataaagggtcctaagcgggtccaaataagggtaaaatgtcacggttaagtctatttctgatgtcctccatactaatggtcgaatttgctgtttcataacttcgaccctctggttttatggcatctaaagatagtgacgtcgattcagctaaaaaaatccgtgccgataccaccttccgataagcatccaaatgttgtttaaccgaggtattgttttcatttttggtcccggtgtgagcgattctaaattgtgaccctaacccattcgcagaattaatgtaaaaagtaaagcggagtgtatataagagacgtaaaaactccataaaacggagtctcatgattatagcggggacttcgtccccaattaataccagtagcggacgtattgtggaaaccgattagattgcccgagcggattagctgataaagcagcgttcatgagagatttgactggtactaaatcggggatccttgtgatttcatatggcattggtaagggtataaatcggtgtaaggttaataaaatgggggttgcctcattacccgccagaaatacgacgagcgaccacttaccgccacgagctgagtgattcgcgtaccggtacctactcacgagaaatagcatcgcgtgtattaaatacgcttctgtgagcttcgatgtgtactgctttctatttatcaagctctgaagtcatgtatttgcgctgtcatttctcgtcagcattagcgcttgtcggttttacgttaaatcggccaccgaatgccgtgtgggtgtcggacattcgggctgattagcatgcaaatcagccgtcccgggctttgtatgccgtttagcagctaaatcagcttgccacatggcgttgtaggcacaactgacctctctgtcaaatcagagtacaaatcttagtctgtcgatctaattaggaggtcggatttagcaaatcagacccgattaagcttaatcatctgcttaatcaaccgatttatatcccaattagacaatctaatcggtttccacaataaattcaaaacccttgatgtcagcaagctcttttctcgactgcccttgtgcgaatcgcgcttacaaccgccttctcttctcagctcgttacgcaatattacgattaacttatacaatgcctagcccgtagttgccgcggccggcggtgccatccacttggcgtaaatgctgcgggagctctgggccccctccatgagctccagtgcctcctcgcgcgtgaggttgcgcggcagctcgtcttcacgccacaggaacgcgcgcggtttccggcgtccgttgacttcacgcgtgaggtcctcgagggcacgcacggaatcagcacggtttgaacagagacgcaccacgcgcgacttgccgtcctgcgaacgctcgtagcgcaccacgccactctccgccaggaagtcgagcgactgtttgatgctctcgctgcagagcgcctccgcgtgtgagagctgctggcgcaggaacaattcctttgccaggacctgcacacgccgcacgacatcgcgctccgtgtgctcgctgtcgtcgccttctccagcgggcaacaggctccaaagaccttgggtcgtgagccacagcgagtccatgaacggccagttcagcgacagcacgaagctcgtgagcttcgaggtgttccagcgggtcacgtccacagtcacagtgccagaagtctcgtccacctcacactcagcggcttcagcgaggaattgagtcatccgggcttcgatatcaatggcctcgtggcggcaaatgtggcgcaggaagtgacagatcttgtgcgcatgttgttgaactgcccagacatccagcttgtgctttgctgagtaaccttcatcgcacttcgaacgctgacgcagagctgcgtccactgcaccgatgaccgccaactccggcaggaaaatgtggagcaggtggttgcggtagaatcccagctcgagtgctcgcacggggtactggagctgcggggccacgacgttattcgccttggtgtccaccttcaggatcgacagagcgtgagcagcgatatcatcgttctccacgtgggccacagtcgcgccgcgcttctccaactcctccaccaaccacaccgtgcgagcctccagcatttccttcgtcacgtacgcacgcttccacatgagcaaagcggagacaatagatgttgacgtgatggtaccagaggtctgcatgcgctcagccaccagatcggacgagacctgcagcgatgaagtctccgtgagaggcaccggctcaccgaaacgcacgtaggagtgaccgagacgcaggaaaaacaggtcccacacggaacggaacagcacagccagactctccttctctttgggcttgcccagaagctggttcgcgtatccatcgacctcgtacaccttgtcgtagtccagcgagatcgggacaaccaagaccgtcttcttcgaagccttgtcagcgttgtcgtcttcgtcgtcatcatcacccgcagcgcgtgacgtccccttcacgtatttcaggaacatgcccatgaagcccagacgaggcttgcacacgcgtccgtggcgcgaccgacctccttcgatgaacacctccacggggttgccatcgtgcagcagctcgtgcacgtactgctccagcacttccttgtacagattgtcgttgcggaacgagcggcggatgaagaagctgccgttggcgcgtaggaacgagcccacgagcggcaggtccaggttgtttccggccgcaatgcgcggcagcgggataccgtacgcgaagcacaagtagctgatgatcaagtagtccaggtggctcttgtgcgtcggcgcgaacacaacgctgacgtcgccctccgaagcctccagcacgcgacgcacgtggtgcagcgactccaaatccacgtggaggccgttgaacaacaagcgccaggtcttggtcagcagccagccaagacaccgcaccgccggcatgaacatgtccgacttgaggctgtcgaagatacgcgtcacgcgcttcagatccgcgggactaagctccgcagcactctcctccttcaaactcgccacctccttcaccctcgccaccagattccggtggtgcgtatccaccgtggacggaggtcttcccagaaggttcacgccaacgcccgagcggcagataaacaacaagtccagcaccgccaatcgaacgtctgccagctgcagggccaagctccgctgcggcttggtggagctctgcgtcatcagcgagctcgccgactcggcgcagcgctgctcaatggatgccagcagccacgacggctccatcacgttcacgaagccgtgctggcgtccactgtccacgtcgtcgtcgtcatcgtcacagtcctgcatcaagtgagccttcactccatccacatcagcctgctcgaccagcaccaccggaacctgctcaacctcctccccctcctctgcatcatcgccctcttctccctcctccccactggagccaacgagcctctcgtccatcacctgcatctcctgctgctctgaggccgcgggcagccccgcccagtcctgctccagcgctgcgccgccccacttgtcagccgaaatctgctccggcttgaggtgcagcggcgtgctcttgcccgccgcctggtcggcgcccagcagctccttgtcgtccttgcgcgcctgaatggccaccgccagcgccatgctggacgtcgtcacggcgcgcgcgcccgacttggccgcgtgctcctgctgctgcgacgcgtccgccttcttgagcagcgcgcgcaccttctcctggtacttctggtagcgcagctgcagccgcagcgcggccccgttgggcaccagcagcggccgcaggtgcgccggcagtttcggccccgaggaggccaaggcgctcgacgcgttcacgcctcgccactcgtccccgagccgcgggtgcgccatgtgcttcttccccatgggcttgagcatcgtagcggcgagtggctcaatcgaccaagggctctctctctctctcctttggctgcgagccggaatgatggcgagtggtggtggggatggaaggtgcggcgttgacgccgtgatgacgcccgtgatgagagatacctgtgtataacgatacagtgggttttagatgatgacaggtggaaggtgggatatatacactaagatctgtttactgcgcaatattttactataggatattattcaacgtaactgtaaaccgaagtttatacaggattctgaagttttagaggatgagtaccttcccggtgctgtggtatctgtccttgcagctctgcaagaaggctcacgcagtgctgcagtgattgtcttgtgtgatttcttccctatctaactttaatggtgtcgcagtcgtggaaacagcggccaacagctctcattgccattggaattcaaaatagaggaacagatctagagcttccagtttcgctagtgtagcttgtttcacacggataagccgtcgtaaagcatgtttcgttgccgctgaatgccacgctgagcggtatccacattgtgagcatagtgatagaagagcatgtgccacagatcactcagcgcagcgctgttgtggctagtacatcaagtcaaaagccccctcaacacactagtaactgtggatagagatccgacctcacggttctactccgctgaacatggaaattgttagctaccttcgtctggggcacataatactattgtgcactcggcaatttgggtaatggcttgaggtatcaagcatcgcgatatgtttgcagccgcccatgctcaagtccccgcctgccattgctttgccttttcgcacgatcgcatctcaaggcccgaaattatagttggagaaagcggaatgaactgcggtacgagcaccggagtcgaagcacaaacaacgcaggacactcggtatgctcttgcacaaataggcctaatccatccccgcgctgaagcaaactcggtttacagcaggataagaagttctagcgtgagcagctagacagttacctgttcaatatccagtggatattatccactcaatgctctaatttgcacaggcacgcagcatcttgggcggccaccaaaattgatataccagcagatgtgttagccaagttgaagtgagttctaaatctgtaaaaatcagtatccaaccctcttttttctgtccgtctagccccggccctgattcgctgtcaataattatgggcgcagtccgtttccagcgcccaaattagcctcttgccttgccacttgcgtcgcagtcgctcgtgtgtgtcagtcacttccctgcattccaccgcggtgtcggtcctacaagcaagtgcccaccatgaagtcgcagcggctgctgtggctgctcgcggcgtcctgcgcttcgtgcgtggctccagccgccgccacctgctccagctgcgacatacccgacgcgtcggcgctgagcttctgtggcgccttcgtcgtgttcccggcctgccgctccgggggctcctggaagaccatggtcggtagttaaattaccacactagaatatgtgtatctcttatttctgataaaataaattattatgcaatgctgcaggatgccagtgcccaggagcggtacgccgccctcaaagccaatggctcgacggtggacgccacgtgcgagacggcgttgaagcggacccagtgccttgcagtcttcaacgcgtgcgagatggggacccccgagacattatgcctcgacagctgcacggaggagcttgagaccaattgcgtctcccaattgtcgacttcggagctctcggccctgcaggtcgacgcctgtggcagcgagaaccagcctgtgactggagttagtgacgagggcaagtgcttcgacacggactacgacggccccaacaaggccatctgggtcatcggcttcaccatcgcagtggtcttctccttcctggccagtgtgggcatcaacctgcagaagaaggcgctcaagcagaacgagctcggaccggagcccaaaccggcctatcaactgccgctgtggacgctgggcttcgtgctgtgtgcggtggggtcggtgctggacttcgtggcgttcggtctggcgccgcagagtctgttggccccgttggcggcgctgacgctcgtgtggaacatgatgctcgcgccctgcttcaacaaggagaagctcaccaagaaggacatcgtctcgacgctgattatattcgtgggggctacgatcgcggtcgttttcgcgtcgcacacgtctccatcgtacaatctggacatgctcatgcagctctacagggacccgctcacgatcgtctacttctgcgttgtggttctgacgattgtcgcccacttctctgcgatcaaggtcgtcgataccttctgcttgatgagcaaacggcatcgcattattcaggtggggacgcctgggatgtggtcgactattcgtctcgtagggtatgctgggctggcgggaactctggggggccagtcggttctctttgccaagtcgacggccgagctgttcaaaggggtgtttaacggagatgcgagctgcttcgcgcactaccagacttacctcatcgcgttcgcactcgtggtgtgtctgtgtcttcagatcaagtacctgaatggcggactggttcactatgacgcactctcgatggtgcccgtgtaccaggcgtactgggtcattagtggtgtgctgggtggcgtcatctacttccaggagatccgcaccttctcagtcttgcaagcggtcatgttcgtgctgggaatcggtgtcagcatctttggcgtcgttctcctgtcgcgtcgcaagcacgcgccagcgactacagccaccaagggcaagatcgagcgcggtttcagcttcacgtcgccgtcggagtcgtccaagttggagcccccgaagagctccgattcgcgcctgacgcgcgttccagaaggcctcgccacccatgaagtcgttgtcgagcaggaagagacgagccgcagtgatatccctcgggagtttctatcatcgattctggaagccctcaacgaagaaagcacaacggaagaatcggacgcggaggacagcagccacgaccggcgcagtgaaactgaagcttcggagcatgttaatcgccaggcaatcgacaattacttggacatgtccacgactgtgggcatctcggagatccttggcggtcttggcttccagagtgcgcgagagagtgtgctgctcggacgacgcatgtcaagccggtaagtcggtgagccttggcctattgtctttcttctagtctaactgattgctgttgtttttgccttgcagtgtctctcgacgacgctcgcgccgcagtatggatgacattgaggtgggtttgccagcagccacccgagaagccaaccccaagaagccactacacaagcgtcggtccattacattctcaagcttcaggtctgcatctagcaacgacaaggacaacaacaagaaagatgaagatacgccgccgaaggacatggtttaagccggaatcagctagtttcattagtattctacccccaaacgaatatatcctagttttatgagcacagttatcgatagtttgctcgtgctagtttaacgggtcttttcgcggagatcactgtctacgccttcgtcggtgatactatcggggatatgataactgttggcggcgccatcaactccttcaacgcgtcatcgtggttcggagccctcattcgcccgataaatgttgaaaccgcgggctaccaggaaacacaagcccacgtcactcttgtcaccttaacacacttcgcatcgaccggggcgaagcacctgtcctcattgaaagaccacagctccgagtggcagttggcggacgcaatgtcaccttgacgaggccatgcgatgccgaatgggccgtgctcgttgccggagcagattagtccgactcgcgttacagcacctttaatgcgaccgcacaacatttgcctaaagcgcctttaagcctttcggcgcctttaagccaaaaagagggggtgctgcagtgtactggagcagatccccgcaattagaaaactagcaccgagttgcggcaacgggtccatccgctggaatgcctggtgcaggatctacctccgcaaaatcgcgcagacctgctttacgcgcaggtttgcttgctgtggcaacgtgtactcacaacagctcacaacacgaccaaatgagcccatgacacccgtcccgctgctatccgtcaatacaaatccttcattattctgatctgtgtttagctttgcttctgtacaccgattttgcacagattggatgggcgcctttaacctggttgtttccatcgtcaagtgtttgccttccatatacccctaaccctactccgttggtctggtcgctcgtgtcggtgttcgagaacactgacgccgagtctgcggggaacttcacttctactagatctttctaagcgatgaccccgtcgaactcaacgatggcgcaggagcctcaccaccactgcgctgtggcaggaccatgtgtcgactttcgtatccctgcaccggcagccgcggtgtctgaccctgagagtgatgttctatcgccgcagattggctcaagccttctcctctctgaaagctccagttggctacgcagttcggctactacaccgagtatccctctcacgcagttgacgccttcgccggcagcgaaccccctctcgaccgagcaggcaagcccgctcgatgctgtctctgtagcgaccgcccaagcagcgaccacggctacgcagagttcggtccaagaggccccatcaacctcgctagtggctacggcaacaacgacgccagcttcaacacgtccctcaaaaggcgcacaggcgaagtagcgcaaagaggatcttccgccgctgtgctggacgacggaactggttgagacgctgttctacctcaggtaagcgtacgctttggctttctactacatgatgataaggtgcttaacatctattttattactgtatctacgtagatacaaggggatggccaagcgctttaagaatgtgcgcaacaagcatgccatgcaccgcgggtggattgccgtcgcgaaggagctaggcaagcagcgtggcgtaggtgtgaaaagtaagcaatgccaggataaggtaacagcatattcaccaatatttttttacctagacacgatgtctaattcgtatgattgtctgtattgcactagctcaaggcaatgaatccgtcaatacaaatcctttattattctgatctgtgtaaagatttgcttctgtacacagactttgcaccgattgctagggcgcccttaactttacggcgcctttaaagtgtgaggatggctttggaaatgggcaccccgaaggagtccctgaggaggcgggggtcctgctaagtgcctacttacactccgccgatgcaagctagtgcgttcgatagctttaacatacctctatgaagtaggcagtaccaaaagtttgtccagatgcaggcttacgtgctgcgtagagtcaaagttagcactcgtttcggactttggaaagctgaagcaacagtctatatattcccctcctacctgaaaaccagctgctttacgttaatggcgccttgggcgccattaacggtgctgttgagtggagagataacacaccatcactcagtgttttgtgcaaccataaaaagtgtagcagcacctagaaattgtgttgggatacccactgtataaataggaagcaccacctaaaatataatgacaaacaccgactaaaatagagcagccacccacttgtaggcgacgggacactaccttttagcagttagcaacttgccatggagggccgtgaagaaaacacagccgacaccctggggtctccgacagcgcatatgaggttgaatcaccaaggtggactaagatctgggcatcggcgaccgcttctgagacgtttgaagcctttcgtgataccctccctaggcgaagcatcaagaggagtgaccgtacgaactgcacaatcgaccatctactcaacaagaactacgctctcgctactgccatgcacaagatgcgagttcagactacaaagtgccgatcgcggcgatgccatcctcatcgctctgaagacgatgacgagaatgactcagccattgatgccccgggggactgtccatgccgatataagttccagatttgccaatcgtccgatgtgcaggaggtctttcagcgcgacgcccacctggcggacgtcgacgggtcctccagccccatcgtgcgcaagttaacgcctgagatgaagaccttcatagtggagcagctcagctcgggtgtgaaaacgacggcttcgcgtttgtttgccgttatctgtagcatggtgcacgaaggtgacatgcgtgggcccccgcccgaagaccagcaggttgtggactttgtgaaaaattggagacggaaaaatcctaagaacgaaatggcgtctacaatcgtgatttgcaatggccacctctacgagcaacaagatataacgacattagacgagtttgagatgatgatcctttacacgcaaccggatgcgcgaccgggaagcacaagcattgtgtcgcgcttaggagatggatcagaggcattcccgtttcgtgttgggatgacgtgcattcggcaaatccgcgattacatctcggtacagaatcgcggtgactgtacaacgattctgcacctcgatagtatccatagcatggccatccatggctactcggtctttgcatgtggctactcggatcaaagttgccactttgtgccgctagcctacttctgtacatcccagaagcggaagctggatatcggttggtgtcttcgctacattaaacgggtctgtgtggatatcggcaatgtaccttttgcccctcagtacgtgatgatggacgctgacaaagcccaattcaatgcatccgtgaccgagctgccccattctaccgttctaatgtgttggttccatgtcactaagaacgtgtggaagtacgcagcggagttccgcgtctcctacgacgacacggcagctgtgtttgaagatctctatgacatgcactatgcactgcggccggattttgaagctgtaaaagcgcgggttttggggaggtggatgggactagctgcaggatctgccgtacgcaaacttacagaccatgtgacaaagcagtggattgagacccagcgctttgctaaatggcaggcgttctacaccccgcgaggatatgctgcgaccaataaaccgcttgagcagtatcatcggcgtttgaaactggagtgcccaagcaatgagcatacgcccgatgaattgatcaagagtcttaatggtgcgcggcttgcttttctgcatcgaaatgtgtttttttgcaattttcctacagcctcagaaaggctcatgctcctgtacaggcttttgtgccgccgaggttgcatttccgtagagcgtctgcctccgattgggactgtccaggccgatttgtaccgcgtcctgcatcggcctttggctctaaccgccacagagaagaagtcggtgaagcagtcaattaaatccgccaatacaaggcgcaagcaactcgaaggcatgcccgctgcgggctgggttattgatgtccgcagcaaggcttgcccttgcccatatttcgagaaaaacggtgcctgttgtcatcttgctgcagcgtgtatccatgcaggcgtgcatatgccaggcgtaggcaacaatggcaggcagttcgtgcacccgcgtcatcgcgcagatcagatgcgcgtggaatctgcagctgtagttgacgcgaatgctctggatggtgtcagagcggatcccgccgaagatacccccactactcgcgtccaaggactgcaacaaatccaagaacaggatcaggttgcaggcagcagtacgattgaacccgatactgaacggcagcttctgcaaactatttatcgcgaaccggcccctgctctacagcaggtagaacagaacgatgggcgtgatgacgacagtacgcaggatgcggtgtcggattgccatgtacgagtactcagctatctcttccagcagccccaattcaacttttggtccagctctctcaggacgaccgtgagcccgaaaacgtccgaagcgggcttactatttgtcctgttgtcgaattggcagaccgagtcgagcgtccacgtggtggtgggcgcagcactacatcggaggaccctatgaacacaaatgtgcaggtcggcgttcgtcgctctcgtcgcgcaccaaaaccaacgaagcgatcgattgagtctcgcttacaaaatgataagcgagcacgaacaactatcgctaagcgttagaggaattatgcttgctcgcatcttttattcattctacttatctctcaatataccgttgcattgatattcactaaaattcatgttaaagttttactgacggccaaccttacaagtgtgacctcgatgttcgcctgaccattctcatctattgtttattccaggccatgtatgcgcgcaggattgtctacacgatgacgctcaggtgcggcttgatcccgctttagtctgtgtgacgacgctcctacatgacaagttcgtggacgtcctcgaccacatccccgttcagtcgttaaacggatcctcgtcaaatgtcgagacgcccgccaaggtgttcacagtctgcacgacaagcgacgtgtgaacgcgggtgagatgattaagatactctagcgcgtgacggcggaagttggttttcatgatagggaggtgttgcagcagtttgttacggccacatcgcccggggactgtcgggtcctcgagcttggccaaattaccgccgtacccccgtcggtcatgcggatttgccgtactgagcgcttaaagcgcagagggattgatgcgtggtggcaatcgcgtcgaatctgatgagctagtcgatcacttctctatgtgtacataggcaacgaatatacgtgcttgaaccccttcctgtcggtgttattacacgtgagtatgatggcgaactcctattccatccgtggatatgctatatttgctatgtcggtgtttttttgtattgctgtggtggtgttcacttaagtgtaggcgctacagccgattctttcggtgctgaaacacccccctcggtgctgttgtgctgtcgcattaaaggtgctctaaccacctcggatcagcccacgcgttacagggatggagaacgtagcatcgtcgaggacattaatagaggttgctgtagtgcttgtgatcatcgtggaaaggcgtaggatttgtggttcatggagacttgttgctgcagtgccaaattgcaagtgaacctatgctgtgtgaactcaaacaacggacagaccccaacgggtgaaaagtggttgggtgctattcgtttcattaaagcttgacatatcaggattcgatgatcggttaatgtcatattgggtatggtgcgttgtgagatcgggaaatgactgcggccgggcgagttccggccgaggtctaactgccttgagcttgcgagagatggctgaccgagggctctgattggtcggtcacattccccgcgctttagtgcccagaagattgatagagactacggagtgacagggtctcggcgggtcaaaataaaccgcctgccgaggcctccgaagtttcatagtgggtacactttatgcccagtaggagttcggatttaggacgaagcttcgtccgattgtaggatcagctcgaaagctcggtccacacttgatatttgtatagaccttagggattagctataggagaggcctgacagcctctaatcattaaacagagcagaattttcccccaagccacacaagggtcaagtccgtctacggtaagtcgctaagcttagcgtagggtctggatacactcggctgcacggggtatgtctgccggtgagcataaggtgcattgaccgagtgttcatcctggtaaggccaagagtgagtaggtggccgagtgttgggaggtattagagacctctgtgtacagttgaacgttggactgggtgtgaggcaggggcccccagtgtatttgacttctagccgaggcttcgattggcctggtacccttcctttctgagggaccacagaggtttagtgcgaaagcacgtattacacattgcatcctaaccgtagctcgtggctaagggtgctcttatattttaacgatgggtaaacctacctgacccgcaacacacagggaggcacattccagcccgtataagggatcggacctggtcttcaggtttattatcccgacaatctatcgccgaatcttcggagacggcgtgtgttgttggtagggctcgtcctagagacttcggttgacagggcgaggactcgtaaactcgtgttttcctacacgacaactggtgccgcgacccgggactggtgtgaccgattgtgtgttgtggtctgtgtaggttttgcccaacgagcattgaggagagaagaagtgaagaagagaagaagaaacaagaactagaacaagatggcgaaaggatccaagtcagcggtaccagctacgccggtgaagtcgggacgaggatcggccgaaggttcgtcaacgatcgcgagtgacttaacgtctcggttgtcgacgatctccgaaaggtcggtcagtttcgaagagtcggttgaccaagattcggacgccaaggatgacatgatgatggactatggtgacctggaggagaagactccagcgacgacgcaggagttcggagatgaagaagatgcgatgctgtccgtgggacgtagcggaggctcgcgctccttgtcccggaacctcgtcgcggaatttgatgaagtggcgaaacccgaccatgcggatgacgacttttaggatggcaccgagacatcggcttcgagggctctggtgcaggttactaagggtcctcaagaatcccgcggaagtcggcccgctatgaacagcagcactccagctgcgaacaaggtgctcggcagaatgctcgagcagatggtggagtcgagcgagtggatatggcagttagtggctcagaatgccttttgggcttaaaaatgcacctatgatctaccaacgaattctcgacaacgctctgtggggctttgtccagccgaggtgtggcaggtagcattacgcgcgtctgatggccgaagctgaagttcgcgaccgtgaactcgccaacgcctcgaccgaacagtcacatgaagagtcgtccaacccggaccagtcgcctacgaagtttgaagcgggacttggaatcggattgagtgaaagctcggtctcggaattaatcaacagtcctattgcggacatgtttgcgaatggagagcccgacgagtcttcgtcggtgccggttttcgaacggcgtttgtttgttgacgatatttgctttggcggcgagtctttcgataaggtctctgccgccctagaacatggggccgaggacttagtcatcgtcggggactcgtgactcgcaatccagcaatccctaggggtgatcgcttgccgtaaggagtcgctgatggcacaactaaacaagcacaaggaactgaccgcgagacttcggtccgtgaagtacctacatgctatccgagcgttcaatgcagctgcagactctttggcgagcgaaaccttggagaagaaaatgtcgatgacggtgaacagcgaagaccggaaacgagagttgatggaattaaatcggatccgagaagtgctctatgaaccgtcagccgaagcctctgaagcttcgggagaagttgtaacgcgtcacgtgaactcgatacgtgtgatggatacgtgtggcagtgaccgtagtaggaattttttcgattttgttcgagatactgggcatgtggccgcggtaacgaggcaacaatcccgcgcgcgtgcgaaacaagtacgctttgccgatgagacttcgggtgatgaaccagaagagagaacagaaggagacgaagctaacgatgtcagcaacgaagagtctaacgaacttccggaccaaccgagacctgacgcaacggtggtccatgaaccgagtgctgacgacatcgacccgctagttgtgcaggaagaacggcgcaggcgcattggcacagcctaggatgaggagctccggtggtcaaacctcaagacggtgctaaagggagacgaagcgaagcttgcctacaaagctgcacgcgaagcctggaagatggctgacaagttcgtgttaagcgaagatggtttgctgtatttcctcggtgcgaaccgtcggtggggtcgcgaccgggccgagaagacgacactacgcctagtggtgccaacaacgatggttcaggagatcctacagaactgtcatgactcgttggagggcggtcaccaaggtatcgtccgaacctaccaccgagtcaaggctgactactattggattggttcgccgatgtggagaaacacgtacgctcgtgtctagactatagctcaagcaagagtcgcccgcagctacgtgggtactccccaggcaacattctggccgagtgtccgctacaaattgtctcgatggattttgtgatacccctaccgaagactcggcggggcaataccgcactgctactgtttcagtgtgcgttcactggattcgtcatgggcaaggcgatggcggacacatctgcactctgtgtagcacaagcattcgaagagagcgtgtaccgaaggttcggagcgccgtctctgatcaggcatggccgagacccgcgcttcatgagcgaggtcttccaaaccttcgccgagatgatgcagtcgagatctagggctacgttgagctatcgaccgcaggctaacggccagcaggaacgctcagtcaagaccgtaatgcaatcggtgcaagtgtacgcggaggacccgctgcaacaagactgggatgagattttggagaagttgatctttgcgattaacaactcgcaggacaccactaggaaggacacgcccttttacttcgtgcacggatgggacgcaaggtccaccctccgggcaatgtcctccttactgaagcgaggtgtcgggcgacagtccgatacgttggcatggcgccgagaagtcaacaggcagcaggaagttgcgttggaaatggctaaggagtaccaagcagtcgagaaagctcggcgtgctcaaaagcataacgaggctttgagccgagcagaacgtgctgcgcttccaccttccgcgactggcgaaacctcggaagatgatccgacaggtgcagatggtgagggtgacacaccagaccccgcaccgaagtctctcttccagcctggtgatcgtgcgtggctttacatggaacgcgtcaagccaggattgaccaagaagttggctcatcgatggcatggtcccttccgcatcaagcagaaggttgacgagtatgcgtacgagttggatctgcctgacaagagtggttaccggttctacccggtagtgcatgtgtcccggttgaaggcggtgaacaagtttggcgatcggccgaaggctcgacttgctgctgaagtaaccgaggagacgcgactggatttcgacgaggagttactcccggaggatagttgggaacccgaccacctggcaggcgagtatgaggttgaagccatcttggatgaccgaatccccctctcgacgagcactgagcgagccgtccgagagttcaaggtgaagtgggtcggctatgacgaaccctcgtgggagcccgcgtcgaatctgtcttgtggcggactgctgtatgactatctacgcgagaaacgacgtgaccgaaggttgcaaatggtccaagtcgctgacgaggactagttgcatccctctcaccatgatgaactgccgacagggctacacagcctgccccagcagacgaaacatgttactgcggaaagaagattgtatatttgtatgttgaagtggacacgactttacgaagtggagatcacggctggagaaactgtggagaacagctgaagaaggacaaacgactactgaattgcatgggcgagctagttatactacgaacgaactgtctgaataccctgatctagctcgacctaaacatgaaggaacgatggagaactggaacgaagcttaggcgtccgaagacgaggcaaccttggccaaaacgcggagacgcgcagccggagaagcttcggcctgcgtggcagcttgatcagcagcacttggaggcgaacgtggcgcgtcagccggagtttcgctggccggggcctcttcaacaggggcctccgaagccgcgacgcgatcttgaaccgagtcctgcgttgacgttgctgcatcttgagctcctagcgcttgtgtagcttcgtccgaagtctcttgagcatccacggcgcggcgagactcgtcctgagcctcttccgaagactcttcagcaaccggagacgcgatctcttcgatcagctcctcgacctcctcctcttccgagactttgtcttcacctggctgcccgtcctcctgtataccgaaaggagacccgtgaaagttcgtgaactcacgcacccacggagccgtaacacggcgagggtccagcactgggttgaccgtaatagctgtcgcgacttcacgaacggtcatgccacgcgggacgaagagtggaaccctggggtttcacggagcgaaggttgtgttgtacgggtgctcggacggcacatcggtgacgcaccaagccgaccatcagctgagcgcagtttgcgaagcgtcgttccgagtgctcgcgaagctcttcgaccgcagcctgcacctcgtggtggacgatgtcttcgacagcataccactgtgcagaagaacgcggaggaagtcccgaggcctcgtgcgcagttgcaggcagcgggtcacccgtgcagcagaagcgcgcagcatttaacgaaggctcgtgcagaggactggagtcgggcgaggacctggggaccagctgagtacacgcagggtccgacgaagccccgctagcggacggcaaagcgggagttggcaacgtcgaagccactgcactcgaagccgaggtctctccggtgcttgcagccgaagcatggtgcgcgacgaccgaaggtgcggcctggagaccgcccgccaccccgcgtgctcctgcagaggcgggagttggtgacggagcagctccggcgctgccagcagcaccagacgatggcgctgaagctacaagaactgcagccgaagcctgggccgtcggggcgccccgcttgctgacgcagaggcgggagttggcaccaccgaggcctccgaggccggcgccgacgagtcgatgacctgccccgtggggccacgcaattgagtgtcctgcagcaagttgcagcaagttgaagacggttagacgcgatgaagagatcaagcacagcactcaagcacctcgcacgaagcctcacctggacgactggaccgaggtccgggaaagtgaagggcggcgcgctgccaggaccgccggaggactgcatggcgtcggagcgcagagaggcacgaaggcaacacggcactcaccacttgggacggctcgggccgatttgggggccgctctgagatcgggaaatgactgcggccgggcgagttccggccgaggtctaactgccttgagcttgcgagagatggctgaccgagggctctgattggtcggtcacattccccgcgctttagtgcccagaagattgatagagactacggagtgacagggtctcggcgggtcaaaataaaccgcctgccgaggcctccgaagtttcatagtgggtacactttatgcccagttggagttcggatttaggacgaagcttcgtccgattgtaggatcagctcgaaagctcggtccacacttgatatttgtatagaccttagggattagctataggagaggcctgacagcctctaatcattaaacagagcagaattttcccccaagccacacaagggtcaagtccgtctacggtaagtcgctaagcttagcgtagggtctggatacactcggctgcacggggtatgtctgccggtgagcataaggtgcattgaccgagtgttcatcctggtaaggccaagagtgagtaggtggccgagtgttgggaggtattagagacctctgtgtacagttgaacgttggactgggtgtgaggcaggggcccccagtgtatttgacttctagccgaggcttcgattggcctggtacccttcctttctgagggaccacagaggtttagtgcgaaagcacgtattacacattgcatcctaaccgtagctcgtggctaagggtgctcttatattttaacgatgggtaaacctacctgacccgcaacacacagggaggcacattccagcccgtataagggatcggacctggtcttcaggtttattatcccgacaatctatcgccgaatcttcggagacggcgtgtgttgttggtagggctcgtcctagagacttcggttgacagggcgaggactcgtaaactcgtgttttcctacacgacagcgttataatggtggttgttggagatgcttgttggcaacactcgcatcggttaaaattgatcctatcatcggctaagacacagtcagcccaagttggctcgtatggtagttttgtttggtttcgggtcgtttttcaaagtcattgttttcagttagtcaagacacagcgagatagtaatcgagagagcccaaactgctcgaagggaagtgctgtagttggctttgcagaatagagtgataataagagtcgtcaaatagaattgacgcgcgaagaataacagcaagcaatgcgccgcctaaagtcaggattgaagtcaaattcacttttattctgggatagcagtaaccccggagggagtgctgtgtccagcccaacacagattaattaggcggcacctcggtaattgaagccggtattactgacgccgaaaacctggccccggtaactgaagttaactgaatattgctctccatcaatctcaagtccgagacaagctcgagagtgatggagagcatttcgaaaattccgtattcgtcgcatttggacacgagtgctgcgaggaatcgttgccgagatcagcgctgctcgccggtcttcggcaccacgtcgctgatgagcgatgttcttagcttacgcttgttgccgtagctcaccgatatgtgccccagcagctgcgagccgaccccggaactagtgccgacgccgacatcgtcaacttaaggaacgtcagctaatcgtgtagccgttaggccgacggtcggcctctcaaacgacagcatatatgaaaactatttgccgctctggtgtggcagcgtgtgacagctcgtccatctacagtacaagagcaagtaatttaaactaactatattaccttgaaaacacagacatgctctctgacgtcctgagctcaaggagcgaagtgaaagtatcggatgacatcgtccggttcctgattgatccataacggtgcgtgtttgaaatactatctgctcatagctgcttcatctagctagagcatgtatcctgggagaccagcttgctggcttacatgtaccagcctcacaacccttagttcgtcacgaaatgcattcccagttacaggtaacgttcaggagacatcgaaatcgcaattagcgagagtgcaaaaacttctgaagagcaaaataattgtttgcaagtttttaaaagtaaacaggactgcatcatttcccactgaactatcctgtattaccggccagatgctgcggctgcgaagcagccgcagcattgtcgcgtggtattatcgttctgccagagttacgggacagttggagagggacaccaaaagtaactttgctgaacgatttgcggtgcacaaacgacatctttagaaagtagaaggaaaatgtagtttgccggtactgttcttttgcttgttcttcacgtgaaaacagtagaatgctgcatctgaaaaagcgctaatttcacgaacacgattgtgggacactgctgcctctagtggtgcactacacttacactgcatgtttgtatgtaaaatacatatgttcgctaatcttgagccaagctgtatatgaacacatttgcgttagccccaacattttttgtccttgatttagagcgtgttcgctacgcagctggagatggatatctgcagggagttggtgcatctccaaactagcttgttcgctacaacagagcgcatctaggtaaaattagccaatcacagtgcaactacaacgactcgctctccttctccttactttgctgtttcttcgtcggccgggaatactgtgcccgagacaccggactcgtggcaagaccaagctgccgatgacgctacgaaagctgcgcctccgtttccgtcagccagttgcgaccaccacaccaggatagccatgacgcgcagcgaaacctgactcgatcgcatcccagtcctctctcctccgtggaaacgaaatgacagccgccgccattgctcgtaagacgcgcaccacctcggtcgtaatctccattacgtagctccgtgacatacccatagaaccaccgacctctcggtacccaccagttgagcctaaaaagtaaagcgcggctgcaactttcttctcaaagctatgctgccgtactttggcagcagcaaacagaacaccttgatctcgtagtaaaccagcagtccgtaggaaagtcggcttggtgcagcgaagattgtcttcaaaccaacttgcatacgcggctgactgtagcatgggctcaaagtgcagtgaggtcacggtacgaatctgttccttagggcctcgcggcgcatcgtcggattctcaaccagtacagcttcctcttcgtccattgtctgtgcggctgaactgcctcaatctccagctactttctccttctccagctcctagagctggagaaggagacggggtaattctccagttgtcacgttgtgaactaaactattttgaccaatcaaaagacaagaaatagagttgataagaggccatctccatctccagctacctagccaacacgctcttaaggacaaaaattcgcttaagtacgatgtactttccggggttttgttctcaaaccgcagaaaaggaccaaaatagacttggcgtttgtattgagtgtaatcacgcccgggtaagtacgaggtgtcatttgtaacaagttcatagactgtgtgagaggtgttacgtctggatccacataatgaaatcaagtcaatgtgcgatttttgacctagaagcaaggacaaaaaccgaaatgtgatatgttatatatgacacttttcaatctgcatttttatcatgatggacaacagaggacagtgtgcaagcccctcccttgtagaacgaatcaagggctttctggtcattgcaatagtactgtgtatctcgcaaaatcaataccagcataagcctctaacttttggtccttttatttgtccttaatctggggcctattggggttaggagacgtaataagcacggattcgtatattcttgcagcgatctattcactgaagctggtcatttggtttaattgtgtggcctagaaccaaaaattgcatgaggttgctgcatgtggaagcccccaaataaacttggatttagtattaaacaaacatatgtttgattatccgtggggagcatagaacgagccaccgcataaagcgagccacccgttcaatacaaaaaccaagatggcctccccgaaggaggtatttgcgcgcgcattttgcagtgcgttttacatcggaaccagcgctaagctcacgtatgccgtgaaccaagatcacggcctcttcgcccccactttcagatttcaattttcttcactggaagcggagatatgggctctccattatggcccaaattggcccgctttgtctgagccaagcgacgagtgatgtgtgacacataacgaatgccttaatacatgatgtgtaacacaccacgaccacatannnnnnnnnnnnnnnnnnnnnnnnnnnnnnnnnnnnnnnnnnnnnnnnnnnnnnnnnnnnnnnnnnnnnnnnnnnnnnnnnnnnnnnnnnnnnnnnnnnnagctcctagagctggagaaggagacggggtaattctccagttgtcacgttgtgaactaaactattttgaccaatcaaaagacaagaaatagagttgataagaggccatctccatctccagctacctagccaacacgctcttaaggacaaaaattcgcttaagtacgatgtactttccggggttttgttctcaaaccgcagaaaaggaccaaaatagacttggcgtttgtattgagtgtaatcacgcccgggtaagtacgaggtgtcatttgtaacaagttcatagactgtgtgagaggtgttacgtctggatccacataatgaaatcaagtcaatgtgcgatttttgacctagaagcaaggacaaaaaccgaaatgtgatatgttatatatgacacttttcaatctgcatttttatcatgatggacaacagaggacagtgtgcaagcccctcccttgtagaacgaatcaagggctttctggtcattgcaatagtactgtgtatctcgcaaaatcaataccagcataagcctctaacttttggtcctttcatttgtccttaatctggggcctattggggttaggagacgtaataagcacggattcgtatattcttgcagcgatctattcactgaagctggtcatttggtttaattgtgtggcctagaaccaaaaattgcatgaggttgctgcatgtggaagcccccaaataaacttggatttagtattaaacaaacatatgtttgattatccgtggggagcatagaacgagccaccgcataaagcgagccacccgttcaatacaaaaaccaagatggcctccccgaaggaggtatttgcgcgcgcattttgcagtgcgttttacatcggaaccagcgctaagctcacgtatgccgtgaaccaagatcacggcctcttcgcccccactttcagatttcaattttcttcactggaagcggagatatgggctctccattatggcccaaattggcccgctttgtctgagccaagcgacgagtgatgtgtgacacataacgaatgccttaatacatgatgtgtaacacaccacgaccacatacaaaacgtgagttatagtgggagtggctcgctttgtgctcgcgagcgtagcgtcgaaatcatgtctgcatacaattatcaagataatgaaaagcggctcttcatacgctccccacggatatcaccgctggaggaccgtgtctcacaactctggcagaacggatacctcacacaaaatccttaagctatcccagcctacgcataactctcgttgtagtttcatcagccttctatcctcaaaacgcgaataaatcgtagaaattgagcatactcaaggccgctcagagaagcaacgtcttcacgagcctagaagatggagtttctgtctacactgtttgtgcgatcacaacgggcggcatcgcctggtccttcaacttgtgattatctcctttgccgacgttgtctccgcgctggcgcagagctcttcttgttagtgttacgccagattcgatgggtactgccgccgctccaagaccgttggttaccctcgaaaaccgcggctgagcagggaacacgcacgcccacgtcgctcttgagatcttgagacactgagcatctggccggagcgatgcacctggctccatcgaacgaccaaagctccgagtgacagtcggcggaggcaatgtcgcctctgcgagggcacacgtggccgaatagtccgtgctcgtttccgccgcagactggcccacgcgttgctgggatgaagaatgttgcgtcatggcgcacgctgacatgatgggaaccggtcagtgcagtgctgtcagccatggtgggatacgctttgtagttgttgttgctggagacttgcgcttgaagtggcaagttggaaagtgaggggttgtcgtagtaaatatcaatggtcagttgtaacggatgcaacggatgctggcaacattgatggagcggcaagggacagccccaatgggttaaatgattgggcaagtgcgtgagttttatcagcttgacggttaatgtgactaacctgagatgcagtcttgttatcgtttcgagtcgcttacaactgggaaatgttcagcccatgaaagtagctgctcgaatgatgcctctgaaatcgtaacgagctgccactgattcccatatcttccgattaaaaaatgcttgataaattgcttttgttctgcccaagttacatgtatcctattcgtctagactaactagttttgttgtcatgtagcccctacgatgacgcgcatgccgtagaatagttggatattgaggaaggcttgccagccccgaacctgaagagcaagcactgacccattagttctggtaaggaccgcgacaaaaatgaggacatagattgccgtttaagaagctactgaagtctgttagtttgactaacctctattcaagtaccagtaagtagtctccacaagaaaaaaaaccgatggtacaacgacttgcaagtcgtatttcaaagcactaattattcagcccacccgtcaagctatgcaacggatgccgccaaacaccacttcgtgctttataacatatttgatcctggccgaatcacacctcatgacgtgattcgcttgcgcctgtagctgttgacactcattgcacttctcgagacagcaatcaacccttttaccaactgaaagatgcctcgaaacgacaagaaaactgcatctcaggttagtcacgttaaccacctagctgataaaacgcacgtaaccaaccattttacttttagaggctgttcctggctgctttccgaatccattcaacttaacggttgatcatataaaccgaatacggtcaaccaccattgcatccgcttatgtcgatagctatccgatccgcactgttggaagccctttcgcatcttgcggtcaagcgctgggtacattgtgcacagaacagctacgaaagtgaacaaaacatgctcaatgtatccaccatatgccaaaatggcgagcttctattggtcgtggcgagcgtagagcacgctcaaaacctgctacatggtaataccttgcaagtctgctaaggcagcatacttcggctccagccacccatcttcgacacgtcgcgataaacgcggaggaagaaatcgccctgttcctaactgacgtagtgaggaggaactgggcgaattcttcctagtgcttgacattagcgcatcattagatttcttttttttagcccacctaacaagcttgttacgattgtctttctaacaacaccagggagcttgcatgctcaatagcccgtaatgacacgcactacacacggttcctcttgtacgaaacaggacaatatatgatattcatgccaacgtcttcttcttcctttacatgcgcacgctcttcaatgttcgcgccagccgtgggtcatcttcgccattttgtcagcctccgctttgctctgtactgccgctccattcctgccgctttcatcggtagcctccgtcgtagcctctgtccattcttctgtaatctccggtgtaacctcatcacgcggacagcttcttctgtagcatccgtcgtagcatctaccgcttcttctgtagtctccggtgtagccacactatgaggagcgcttcttctgtagcctcttgagtagccactgcatcagccacaatacagcggtagacccggctgtagccggcttcgtaggaaccgatgaggttgtgcgctgactccgcaatcgatctgccaatcgggccacacgcgagagctcatagcgtcgtctgggtcggatcaccaggtctggtaatcaacatcgcaacgtagaatcaatataccactagtacaatgttacagagcaaagtacacgctctcgcttacctgtagatcacaatggcgctcatcatgatcgtcttcggccatggtccttggccacttgggcgcgctcgatgggccccaacaaagcttgcattgcgacgtcttaaacagcgcagtttcggaatgaaggaaagtacgagtggctgacacgcggcggttttaggcttccacccgaattttcaaacctgttggtggtttatactcgtccgtctattaccgcggaataaaccccgtttatcttcccatcgctaatctaacaggaagatgtgcacaatactggctatacaaacatccatatgcgaagacgaaagagaggacaagtttgttggatattatgtcctgtgacaatgcttattctgtaggatacagaatacggggttagagggctaaagtaactggctgttggaaatcgtgataagcgcagaaccctgagcatgcagcggatgcctggcggtacccgcgccgcaatcgaaggcataggagacccgcgacgcagcatgtcaccgctttgaagacctcaagcatcttggttcaattcaggttaacggcgggggtcggtcatttttcaatatcgctgcggtgctcaaatgcctcgaattttacttaggtttgcctctcaatcacacttgaatctaggctgaagacttgtcttcgtcgccatcacccacctgtaaggtcgtaaacattttaaaaaatgttttaaaaaacatacactttcaaatattgtatcttaagccttctagatttaaagttgtacaacccaaatattagtactaaagtactattagacgtattacaaaattacaactaatgctgaaactactatcattaccttcagcaagttaacctatggacccgcggcgcgccggcgcgtgtggcccctgacggcaaccagcgtctgacaccttcaccgttaaatccccacctgaactcctcttcaatctgataaccactaatatgaagtcgcgcttcgatatgaagatgtcgcgcccacttcggtctcctcgtctgtcatcagcttgccagagggtgggggaggtgagctccctccttcgttccagcgtagatccccgtcagtcttcatttctccgctcagaaaggagatgcctactatggaggagctcacggatgctgcggcggagggcgacctcgtggcagttcaaaagctggtggggcaggtctccgtcgatggaaaggaggaggcgttgaggagagctgctgagaacgggcacctggcggtcgtgacgcacctcatcaaagagtgcgcgatcgaggtggatgccagggacggcaacgaagacacagcgctgatgctggctgcaaacaatgggcacgtggacgtcgtcgagtatttggccgagcaatgtggtgccgacgctaacgccgtcaacagttggggggagacggcgttccgaaggactgtggagaacggccacgttgaggttgtgcggtaccttgttaaacaatgcggcgctgccgtggatagtcgtggagactcagcgctcatgttggctgctaaagaagatcatgtaggcgtcgtgcgatttcttgtcgagcagtgcggcgcggacgtgaatgccaaggacagttacggagccacagctttgagcttggccgctgaaagtggccacattgctgtcgtacagtatcttgctgagcaatgtggcgctgacgtgaatatcaggaacgactatggcgagacggggtttctatcggcggcgaaacgaggtcatatcgatatcgtacggcatcttgctgagcaatgcagcgctaacgttaatgccaagagcgaccgtgacatgacagctttgatgtgggccgctggaagtgggcacattgatgtcgtacggtatctggttgagcactgtggcgctaacgctaacgctaacgcgaaggacaacgaaggagatacggcgctgattcatgctggcggatttggatactcggatatcgtgcggtaccttgcggagcaatgtggcgttgatgcgaacgccacggacgagttggggtacacagcgttgatatgggctgctgagaatggtcacgttgatgtcgtgcggtgtcttggtgggcggtgtggagtggacgtgaatgccaagactgatgacggatacacagcgcttatgaaggccgctgtacgtggctacatagagattgtccgatacctcactgagcactgcgccgtggatgtgaatgagaagttggacggcaaatacacagcgctgatgctcgctgctgagactggcgaagcgactgttgtggagtacctagctggccaaggtgcagatctgaatgcccacgacgactgcggctacacagcattgatgaaggccgctgaaaacggtcacgagggtattgtcgagtgtctggctgtacagtaccgcgcgggtgtgaacgctaagagtttcagtggatcgaccgctctccgacttgctgctgaacgcggatacgaggaaatccagagagtgctcatgccacttgttctacctgacagcactgatagaacgacacttcccaaagttgtggttgaactgccgccaaactgctccattgacccgtcggaagtcgagctcactctctacagtcaaaacggccgcatcgggggcgacttccaggccaagtggctcgatgctgacgcggtcgtgaagtttttcattccagacgcctcccattcatcgttcggtgatgaagtgcgtatgtggcaacaactccgccaccccaacgtcctcaaaatgtacggcgcatgtgatgcaggccatcacctgctgttcttcgtgtgtgaatacgcgtgtcagggctcacttttggagcatgtcaagtcgtcgtcagtggagacacagacgatgtggaagtacctgtacgaggccgcgctaggactcgagtatcttcacgagcgagggcttgttcatggcgacttacgatgcagtaacattttgatcggcagcgatggcatggcgaacctatcgaactttggactgagtggatctatcaaggcttccactgcagtgtcggatagtattgttcggtcgatgcgctggcaggctccagaggttgtggaaggagcgcccccaatgtttgagtcggatgtgtattcactgggaatgtgtattctggagtctgtgacaagagaggaaccatggggcgaagcgaccgaagagcagacgaagatggagaaattgaactgggctacagacgacgagttgtacgctgagtttagaccttactgtccacagggcgacgcacacgaattagtgtgggaaatgtgctgccaagaccctcacaaacgcgcaagtctgtcgtcggtcgtctacaaacttgagcgtttggctgccaaggagaattccggtgcctcccaaccggagcaggaaccgctttgctcttttgaagaatatgcactcggcaaagttcaagaagcgtggctgaggctggagacgtacatgcagaagtgcgacaacagcgaatactgcgcgacatttgaccaactcaaatccctacacgaacgcttgcgagtgtcgacccaccgtccagccttactagagcgattccacgcgcttgtcaccgagttttaccaaacggtcaagatgtcgcctgatcaagctctgatgatgcgcttgtcgtcaacgcgcgccaccagcaacagtttgcacgcgcttcagtggcgcatcgagtcactcatggcatcactaggtggagcagtggagggtatctcggatacgatggaatcaggatggcagcaacaacgcccagacgagaccaaactgcttgtgtcgggcgtctccgatatgtttcttctgctgcagaagttgaagacgacggaggaacgggcggcgtatctgaagacgttaaaggccgagatagaaacccctctagacaaatacagattcggaccctcaccagagaagcaaggctattgcgatgtttcgtcgcgaagtcgacatttggtttggcttcagccaccctcacgtcattcggctctttggcgcctgtcacgtcggacggccgttcttcgtatgtgaatacgctaccaacgggacgttggtcagctacttgcgagagcatcccgacgaattatggtcgaagctgcacgaggctgcgctgggcgtccagtacctccacgcacgcgacgtggtgcacagcgacctgaagggaaacaacatcgtggttgggagcgacttcaaatcgaaggtgacggacttcggtctcagctctgccgctagcagcgaagacatggcgcagatttcaggtgcgtggcactgggtcgctcccgagtgtttttcagacagcaaggcagaagaagcccaagagcaaaagagaccatcctttgcgtcagatgtctattctctgggtatgtgcatcgtggaatccctgcgggtcgtggaggcagtgaaggctgggaaggacccacgccgttgcctgccatggcgtgttgcggacaggaacgtggtgagataccatgctacgcatgctacccgcgcgcccaatatgcagcgacagccaatggaagttggttgaacgaatgtgtgttctggacccgaagcaacggattaagatttcgacggtggttgacgagctggccagattggcgaaccctggcatcaacatccaagcgatggccgagcctgacgccttgccagcagatgccatgaatcaagcttctgtccccgacatgcttgctgcagctcaggaggagctgggttggttgcaaggcgacacggatcaacatgtttacgtgttttcgttgtacaaggcattgtggaagcgacttgagtgcgtgcatgaacagatcgctgataataagcgcgagggctgtcacgcatcgttctactcgctagttgctgaggcgcgcgcgtccacggcggcacttcaagagaggaagcgaggaaccatggcggtagcggagaccacgatgcggtattacgcgtcggatcgagccttgacaaagttctgcgaagcacagtttgtacacggagacggaggggactagcattaggttgacgttcgattcattggcggggtgagcgatttgcttgttgaggttatgagcgaagttgacaaacgtgccaagaccggtggtttgcctccgtcaaatacttggatgtctgtacccggacatgtcataacggatgaacaggttgttgttggcattcgtctcataagattggccgtcggattgaatgaatttaacgatcattaactccctagttgcgccgcagcaacgagaacgacgaggacacgcatatggtttaagccagtatgttctagtttcgttagtcttctatcctcaaaagcgaatgtatcacagatttatgagcatactcattctaccaccagcttcattgatccgatcagctcaattccacctactcctgcgtcggtagcgccacctgataaggtgggagtgtgaccactactggcggggtactgggctccttcaactcgtgtttgtctctttggtcgtcgctgtttccacggtgacgcagagatctcattgctctagtggagtcggtgaatacgatcgctcctcctgcatcgtcttcgaccctcgaaaactgctgctgggcggggaacacgcacgcccacgtcgctcttgccaccttgagacactgggcatcagtcggagcaacgcacctggctccatcgaacgacccaagctccgagtggcagcaacgtcacctctgcgagggcacgcgtttccaaacgggccatgctcgttgccggcgcatatcggtccacgcgctgctgggatgaagaatgttgcgtcgtggagcacgctgacaggtacgggggtcgcgagtgcactgaagttgttgttcttcttgttgggtgtatggaggcttgagctcgacgtgcgaaatagcaaagtgagtcgtggtttggttcggatcggatcggatgcccacacagcggatgaaaagttgttggtaatagtcttcgtttcataacattgactcttgcgtgaatggatcttgaaacgattgaagcttgggctttccttttcgtttcaacgtcgttttacaattggaaaaattccactgtcacgtcgtaaatgatcaactacgaagtaacttgctagagtagctggttgtttggtgcgtcggggatcgtaacgagcgcagaaccagaggatgcaacggacgccttgcgttgtttgggcccccgcgctgcaatcgtcgggatagcagacccgcggcgtagaacgtctcggtcactagcgctcacatctccgccgcgctgaagagcttggacatcttgcttcaactcattcacggctcgtagtagctcctcattctgcaacgccaactgcagcaccatgccttgaaggaccatggaattatcggagcgctctcgagagacaccgtagctgtttcttggactcgaccttgcgtatcggtttgagtgtggagtgtgcctcaatctattccaacgctctccagcgagacccctgtcgtcttcttcatcatcatcgccactctcctcttgcttgagcgtatcttttgacggcgaggtatcaacatcagcgggtagtaccgagctctgcatctctggtgccttcctccacttcgtcatcatcttcagtcgaaggggtagaatcgttagaaccttggtggtgaacactctaccatactcaacagcttcgcgcttcagatccaagtgcaagggggctgcttccagtccgtcgtcatcctccccctcgttgtttctcttttcccgctgggacgctcgaagtcgctgtcgatcgacgtcgagttctcgcttggccttcaaatatccttcgtataccacaaccagaaacaaattggcggctacgaacacgttgaacagcaagaagcaggcgagcagcagagtgcgcagagttgacgtgccggcagcatcgtggccgatttccccgtaagacgcagctgaaaaccccagcagcgcagataaaccggatgatcctgacgcagctcctgtcccagtctggagtagaatcgccacgagcgaacgtacagcctccggtagactctgaaagagcgacgactgtgctcctagcaccaccagacacgcgctagcgtaccccatcaccaccagcgccatcacaatcagcaacacgaacaactgcggcgctgcgcaaaccacagcgcgagcgagcaaatccaccggtcgagatacgcgcagcatcagcaacaactcgatccaagcgagacagatgctagcacctagcgcaagctgcgaggcccggaacgtctcgacgtatggccgcaaaggcacaaacttgtccgagtctagcggtaactcagaaggtcgttttaccatcgctaccaagcgcagcaaccacgcacaagtgaagcagagcaacccgaaaagtctcactccgctgccatgacgctggtgcagaggactgggtctcgtcttgctcctggatctggatttataaagacttgaccgctgccaaatcgcttggtactgccactgtcgcgagcgagaacgcgccagtgcgagcacttcatccaggaaaaagtacgcgtaaaatataatgacgatgatgtggcacgccgaagagaaccagtgatctgcgtccagcaggaagctgctcttgagcggcgccactcccgcactaagtgaagcgatcgccccgcccgaagccggtaattccaccataaatcgtagtgcaacgatgtgtcgtagcattgcattaaacaaactcaagtccaccatgactgctcgagactgtccgtcgatatacccgttcacgctgagtgcatttaaaatgctgatggcttggtcttcgttcgagcgcgggagtacaactgagtacgctggagctggtagcgagtattgcgcacttgatacggacatggtcgagaagaatgcagaccgctcggtatctgtatctgtgtcattgagtccttcgaaggtgtatacatctgaattgtccacttgaataggatcgcttgcttcgtagcttgatgaaaagtctccgtcacttgatccgtagcagtagtaagcgccatcgtctgtgctggattctgtccaggagaagaacggcgtcactcgtgatgaacagttgaacgtgtccacgcggagctggccgatgcgaatgccaccaacgatacgattagaactgagtgtggacgacccagctgctgagtcactcgaataagcgatggagatgaatggtcctttcaaccagtcatagtactcctgagcattcgatatctctgcaaaagttttcgaggctccggatcctgacacagcgaacacagtttcaagataccttactgaaagacgagacaaacggccagttagcatacttctttcaccacctcttgcgcagcatcacacttactggtagtagcacgcatgaagcggtacagacgatcataagcgtatccgttgagcgtgctgaatgtgaagatgccgaggaaaataatttgcagtacaatagcatgcagcttcgagcgagaatttaacgtccgccgccgtcgcacgagagccaccacgtgtcttcgacagagtttgtgcagctgagccactcgttgccctcttgtgctatgccgccgccacctatcgaaccatcaccactacaacgttagttcttcacccgagacagacaaaggtagagttgggactctcttgtcttaccatctttgaagcgagaccgcagccgcaatactcgagatcttggtcagttcgtccaatgactgcaccgcttcaacactaacgcgtgctctgcgatgagagggagtcgaggctgacaagttcgcggaatgccgatggtgccaagaatccgacgcctgattgtcctgctgcagcttgaggtcatcacgatcaccaccatgagccacctcgccgctgcttatcgtctccgtttcgtccgtgtcgtcggcaggatcaaggcgctcccgctgcgacgggaaaccagtgcctctccgccgtcgggcggcacctccgtctcccattccatacacacggaacgatacacgagcccagcaccgtcacagtacccggatcgcttcacgcttggaagggtcagccgcgttactgatctatagtaaatagcccgaaaacgacatcggccaaagttagctctggtaaatcggcataccaaatcaaccaaatcaacagcacagcagtcaaagcaaacacttccgcctataggaaatatatagtgagactggtgctgcatagccagccagcagcagtcccttaataccatctatccgagagaaaacccgtctccgccgatcttgcgggtcgtcgttccctttagtccgcgggggacaggaacgacgcgagggtgccgaagaacatcaggatgatggagagtccggccagtcctgcgttgagcacgatctcgcgcttcgagaggcggtgcgagaacagcttgaggtagcagacgcacggcaggaagaccgacacgagcatcgcgaagaaggcgccgaggaacgacgtcacgcgggcgaagtggggcacgaacagcgcgcagcacagcgcgcccatgccgagcgtcgtgcggatgaaggcgcggtagaacaccagcgtcttgctcggcttgttacgcgccgcagcgcgcttctggctcggagacagcatgaactcctcgagcgccagcgcgacggggtgcagcgtgatggcgatcttgctcatcgggttgagcgcgatggtccagaccaccatctgcgtgagcacgccggggtacgacgcgatgaggttgagcgtgatctccttctgggtggcttcgccgtacatgaggtagcccgcgagctcgatggcgccgtagaccagccccacgatgaagtacgacaggttgagcacgcgcgggtagtcctccttgttggccatggagctgcagatggatgggaacaccgagtggccgccgaacgccaccatcgtgaggccaatcgccagcgggatccggtccaagtcgccgatcatctgcaccggctgcgggtgcagcaggctgcccgagacgtagtccggcgcgctcgtgtccgtggcgaatcccacgaagaagatcgcgtagaggcagaagaaggacgacaaaatgcccagaatgctgaagtacgacagcatcgacatgtgcgtcgtccacatggacggcatgatgagcaggaacgccatgatggtcagctgtgtctccgtgaacgacgggatcagcgccgccagcgtgtcaccaactaaaatccacaaccacaaaaatccaaaatccagattagcctcccagactcaataaaaataatccaccatccacaccatgcatcgaacgtactcagcacgtagaacatggcgcacgccgtgaagagctccgagaagaaggtgacgccaatgacgacgcggcccctagtgccgaaggccgcctcgccgatgtccgggtacgtggtcatgccctcctggtagtccagacacttgcccagcagcttggccgtgtggttggtcacgagcgtgaagaagaggaagagcggcccgccgatgagccagccgctggagcgcagcgagaaggggctggacagcacgcccacgcccagcagcacgttgatggcgttgaacacggcgtccttgtagctgctggtgccgtgcgcgtgggccgcggcgccgctgctgctggcgggggaccacggcacctctggctgctggctctgcgcctgcagcagccgctggcgctccgtgtacgggctgctgttgaacgagcccacgcgcccgggcgtgcgcgccacggacacgggcgacgccatgctgttgtcatcatggttttatccgcggattagtcggattatccgttaaaaagcagcagtgacaaatcgtaccgagcgtcgagcccctcttcgaaggtggagggccacgcgggcgccgcctcctggccgaggagacgcgcgcgcgccacggagggcgagtacgaaggcagcagcggctggtgctcaccgcctgcagagcccatgacgacacacggagggtggaggcgttaattgatctggcggctggccggtcggcgtggtctccacactcaaaatagatcaagcggtgatggggcccgctgattggttggcgcagcgtgtttacaacggcttggacgccatcgaagttttcgatgagacgcgagggtattgcaccggcctcgactcaaggccctcgagaaggtcaagttcccgtcaggcagagcgcagtccggctcgctgctgtgatgcaagtgtttggcatggaatttgagattcaacgaagcagcatgacttcctataataacgaatacagtatcccctttcagacgccgctcaatttgatcccgaacaacgcgactcgcttgcaagtgtattattatggggcccaatgcttggtggtgtcctagcaatcacagcgagttcattccgggtaaatgggagatgagcttgacaattttccaggggcacagcggctgaccaagttttgtctaccccacgccagggtgcgtgatagtccgggcttgttgctgttggtcccgcgttgactcaacgccgttgagcattctacggaccgctggaatgctggccggccggaccttgcgctacgacaagctcgggttgttcatggggactccccattttctttgcgtactccccataggggagtacgcaaagaaaatgctgtgccaaggcaaacagttaaattatcatggaccatcagtatagctcattcgaaacctgctcggattggggtagcaatgcgggcaaaaccaagcaagatcactcggctgcatgctcggcccacatattgaagtagtgctgggtgtgcatttctgtctcgcacgcggcccagtagtcgctgctcgcgtcgatcttagtatcgtccacttcggtgaacttcatcatgtgaggattttctgcttgactttaccgaatctgagagaagtactactgtaggatgtcgtagtgaggcggtggttccaaccacttacagtgagagactttaatggtgtaagtagtgggctgcattgtaaaattggcaaggaaaaaaactgatatgatgaagttggttttgatatttactacagtagaggactgcaaacatacagcactgggtcgtgcctgtcgatcttcctagctaacttacttggaagcggcgatgctgtggcgcgaggcgaccgactccttgccctggaggtcgaactcgtcgtcatcgccgttggtactgctcgacatgctgaagttcatcttcttcatggtgaagtagaaggcgaagaagttgacgacgctgacggcgcccaccgtgaagaacatgtactcgaggttgccgtcgttcaggtcgtcggacggcaggtagggcgagaacatgaccgtgaagaccgacgtcatgacgctacccacggacgtcatgaagaggttgacgctctgcgacgtgctcttgaggccgagcggcacggtcgagtagaacacgtcgtaggccgtcacgttgatgaggcactcggccagcgcgatgaaaacgtagttggggatggcggcggcccacgagatgtcgttcatgggctggctgctgccgccgtctaggatcgggtctccgttggcgtcctgcagagcgccggcgttgcggcgaatgacctcgaagatgcccgaccagaagatgccgacggcggcgacgatgaggccggcgcacacgcggccgaagtggctcggagcccggccgaagcgcttctcgtacagcgggtacacgaccgagtcgaggatggggatgcagatgacgatgaagatggggtcgaacacgcccagcatggcgccggggatctgcgagctgtccgggtcgctgcggtcgaggcgcaggtcgcactgctgcgtgatggactggaagttggcgtccgtctggtcgtacgcgcactgccagatgatggtgtaggccgcgaagggcagcgtgctcacgagcttcttgtagccctcgacgtggttgtcgttgaactcgccgcccaggctctccttgtgctggtccatgaaggactggtcgtgggcgccatacacccagcacaccactccggccagcaccatgagcgcagcaacgtaggacagagcctcaccggcacgcccggagtcggcactgaaagcggacgcgatgttcacgaccagcgagaacagcagcagcaacgcgccagtgaccacgaccgcgccgttgcgggacgcgcgcgcgctctgcttgagcaaccgcaggaacgtcgagatggtgcggtccttgggcggcatgtgcacgtagcgcggcgagccgatgacgaagaagacgatggccaccaccatcacgcccgcgcagatcatataggtcgcgaagtagccgtactccttggggatctgagccgagccgtccacgcagagcaccgacaggtagccgtacgagaaggcggcgccgaagttgatgcagaagtagaagtaggagaagtacgtggtcttctggtgcacctcgctcgggtcgttcgggtcgaactggtccgcgccgaacgtgatgacgttggacttgatggcgcccgtgccgacgccgatgcccacgaagaggccgatgacgaagatggggttcacgatggccttctccgtcatgatgtccgggtgcgcggcgatggccacgaggaagtcgccgatgcagtaccagatgccgaaggtcaggatcgtgcggaagcggccccacttctcgtcagccaggtacgcgccgaacagcggcgtgatgtagcagatggacgtccacgtgctcttgagcgcgctggccgacacgaggctccagccgatcttctgcatgaagttcttgagcccctggttgatgccgtagtagctcaaacgctccgacagctccatcatgaggatgaagacgcacacttggaacagaacgctcttgtacttgcggggacgctcatcccagacgctcgcgtacgcggcgcccggggactcgagggccggcgacttgatcttggacgtcggcatcgcagacgaaattgaaaagtgagagctgctgagagcgagcgagcgggtggggacagacggcaacagacgcaggagcgaccgagcgggatcggagacacccgtgcactgtccttgacgcggtacagtcgccaacgtcgcgaaaagaacgcatcctccatgtccggtttgcacgcaactgagacgaagaacctgcacgcggtgatggccagcgtatcatcgtgacacgcttgacaagccggcggaagtcgaaatgagtccattagagctgtgtactgtaggaactccacgcacggcagacgttgaaaagcagcgtgaaagcttagcaacatatcctacccccgaactcgacgcacaacctgtcgagcggtacatgtacagttacaaacacgggctcacgatacggcgcatggccacgcagttttaatcgcgcggaccttgcacgcttgattaatggcgaccgggccatgcactcagctagaggtgacgcgatgagcttgagggcgtggattggaccagcgcacaacactcgggctcatttggacagtggaaacgctgaagactttacgtgaagcctctcggcgccattgatgtccgggaagcaacaagcaggccgagatggacggcatctttcgaatcagccgagtctacggtccaaggacttcagcacgagatgaaggggttttaacgtgtgggtgattcagtacattttgtatgcttgctgattgagattaatggattaaaggcaacgaagacggcgtatccacattcgtccacaggcgtggcactggagatgagctctcgtcgagtgactgcagatgctgatgggcgctgagcggggtcaatgctgcaatgcgctccggatatctcgaccgtttcggcttgggctcgccaggagctttgcctgcagctcttgcactaggctgcgctgcctcgcttcaacgaagcaaggtctgtgtgtacgtacacttgctccgttgcacgagcgcccgcaccatcggaactgcgtttgaacacccgcgtcaaaattcgctgccggaacgcggtcaaatgtgctgaggatggctgataggcgtctggttgcaggctgcaacttgcagctgggatgatgcttgctaagcgttccactcacctttaacgcaagctgttgcgcaactgcagaggatctcgattagtatgcgccgagcgcgtgaaagctaaagccggcgcgggtgaatcctgcatccactttatacgcgaaactaagatgcatgctcctggaactcgctgtaccgtgcaagtactattgtgaagctaccacgttcttcagttgattggttccatttgccttcactacattgctgtgacttccaaggttagactcgagccgattgcagctcagctggcagcatccaaagtgaataacatctcagactacagtaacgactgctggtctgatacctgcacagctacatgattgaggattgagttgaggccgataacgacttgaaaacgaagagttgatcaccttcgccgatcgtgcggccgccacaaaaaactatttttatttttttattttttaaaagaaaaaaagaaaaaagaaaaagctgaaacttttaagcaattctgtgagatcaaggtggtggcaggaaggaccaagcttactggagtgaagtggaatctagcccgaagtgcgaaacactcgacacgacacttccaggtgaacctgagcaagcagtacatcacacttattgcttttcatccaacgctcatgtattcctatctttcaccgtaataatgcctagctctagttcggcttgcgggcgcgcgctctaaagcgggagagtgacgagaggaaacgatcgtgtctagtgtacgccatcagtgcacgggcaaatgcttcggcgtcgtccgcaacgtaccggtgtagccgttctcacacgtcacatacaaatctgaattaaggtcagctctattttccagaaaatctattccgttctaaaaatattctaagatctgccgccaatcatttgcagaaaatgactcgcgcaccgaacatcctcgtcacgggaacgcccggcacgggcaagacgtccatgtgccagcagctagcggtgcgttctgtcttcaccccgtagctcaccatgtccgcctgcgtcttgcgtatctagtcacccctttctcaccttcaaccgatccctacaacctgtaaaattcctttaggagcgatgccaagtgctgtcccacctgaacgtcggcgacttggtacgtgaatatctcggcttctactgcgagttcggggcccgttcaaggcttcccaagtagctgagacacagcagaatctgactgcaatgtggcgtcgctgtaggtgaaggagcgcgggctgcacagcggtcgcgacgaggagttcgactgcttcgtgctggacgaagacaaggtctgcgacgagatggaggacatgatggccgagggcggcaaggtcgtggacttccacacgtgcgacttcttcccggagcgctggttcgacctggtcgtggtgctgcgcgtggacaacacgacgctcttcgaccgcctgcagaagcgcggctactcggagaagaaggtggcggagaacgtcgagtgcgagatcatggaggtcgtgctgcaggaggcgcgcgagagctacgcgcccgagatcgtgcaggagctgcccagtcgtacggtggaggacatggagagcaacatcgagcggatcctcacgtgggtgcagcactggacggcgcagcacgcggacgactaagcgaagcaggcgaaagggaaggaagcaccatgctttgtaaatgtatagattgcctttgaggtcatttggtggtgctagttactgctgctgttgacgcgcggaatggatctatctacatatctgtctctaggagaagccgccgcagcgaatcgagtctttgaatgatgggcggcctcgggctgaatcggatgaaggagtgatgggcgactgaggtgcaccagagctggtgctcctgccgaagccatgcgctgaagtcggagagagggctcgaggtgcagacagctcacagctcttaaactggtcgacgagtgcccgctgagacgtgctctccagcaccagactctccacagcgcgacgtggcgccttcctcttctgccgtcggcgtgaaacacatcgaattagtttacagtttatctctatactagacgcaatgtgaggaaattaaccttggcagggactttgattggtgacataggcaacgaccacgctggctctggactcgagactccgctcacacgctggtagcaaagcaaattcaaggttcagaatgggcgagtacaaaatcccaacgaagccatggtacgcacccgctcttgaggagacagatccaccgcccgagctgcaatggcgtcactgtcggcgcgagcgtagtcgtctggcatgaggtgagtgatgtgggtcactttgtcagccagttgacctcgcttttccctcaaaaatcgtcgttcatctacagattgtgctgaacgaattttcgctgggtctacaggcccaagctccttgccgtgctctgcgagctgaagacgtagagattctcgaatgaacggggcattggcggggtcctccacataacccggggctgggcgtttccaccagtctgcgagctggtgaaccttggggatatctcgcaaccgctcgatctcgggtggttcgaacttgagactctccaagcgtttgtcgtgttgccttcgagcaaatagcgccgacttggttggcgcgccgctgcaagtcgctcgtggatgccagtgctgcggtgggaggtccagctcttgttgccttggactgcgcacgaaagcgccactacgacgataggagtcccgaaagactttctccgtgcgcgcatgccgcttatcgcaagtcaacggtggctcgatggccagcgctagagcgtgacggtcttgcttccgcgcctccaacaagtcgctgcgttttgtaaaatttggctagatgacaacattgccatgaaccgcattagcacatactgtaagtacacactagggatagcaagcgcgcaccgttcgcagccagtccggcggaatcttgacgtccagagtggccatgatgaagcaggcaaactgcgctagacgcgactatctgcgcacttgagcggttcaaaccagcgggattgacaatggaatgggctcatctgcacagacaggtgagcgacaccagctccgcgtcttagctttacgtttgctatcaagttacagacaagttcgcgaggaagcgagccgtaaaaatagttggactaaaagaagtgtacccgatcacaactaatttgattgtaaattgccttgacttatcgatccgtgagaatgaggtatcgaatgccaactttctgcaggtctgctgacttcgcctcgtgtcgagaaggactttcccttcaccgtttcatgtaccagggcatttctttctcaacttgaggaacttttcgaagtgggtcatgatctccttggtcggaccatgggccaccattatgtggtaaacgcgagcgtcctcgtcgctcaaaatcttcaagcgctgcaaaacttaggcgtcaggtctgttggtcttggcccaaaccttcagatgcatatccatgtcagttgccgtcctcgggaaaaactcttcgtacccatttttaaagactctcttgtcatacttctccacatatcgcacgtaggtcttgaaggctctgcttgtttcaggcgctggaaccccatccagccctaaattgacccagacagtcggaggagggactctatcgtccacccagctcctcagctgcactccttcggccttgtacaaaaacttctggtagtacttgaaatctgggctggtcttcatcgcgctttccgttaatccatcgagctttagcgcctgtttgacggcgtcttcgggtgtctctgatagtgcccaatacgttgttttcgcccacattttcgctttcgctgagagttacgaaaagacccctctctcttctgtgtcagtcgctttgaccgcccgcaatactcttgcgcgactcggttcgccacgaaggtcggtgggaaagtagtgacgactgggttttgcggcaattagtgacgcgagagcaatggcgaacagcagtgccaccagcgaaaagtgctgtagacgcatggatcagccaaccggaagagtcttggtgcttgatctgcaggagtgaaatgagaagtggacatggtacggaatggtaccggcgacgacttacagatctgcaggggctgaacttccgattagagctacgaatcaacagatgaaaatgggcaaagcgctggcatcttcaccccgacgatctataatataacctggataatggacatggatccggaaaaatatagaaggtgaaagtgtgtgcgtgcttcatgattcatgaatcttgtctacttgatggctttgactgtacttgcatttatttaataaataccgctgtattgtagatccaacagtttttaaagtttatttcgatgtagcaccccaacgatcatggtgtatggtggctgattggtgttgagttcctctaaaatggccacgctttctccagttttccctggaagttggcgtcgctcattgggaccttcgccttgccaaagtctgtcgtgttcagagtaatgcgtgcttcgtcggtgagttgctcccacatgatgagaggctgcgtgtcgcccagtattttgaagagctaaaagttgggcgggcccgcaacttgagccagaactcgacggagacggggagtcgtttcgtagacgtcgtcggggccagcggtcctgtagtcgttgtcgccctccgaagtcgagataccgatcatctttggtgtctccagagcggggttgtcgatccagacgacgatacttgcccagtcgtggtgtcttgacgcccagcggctccagaaacccttggggaagtaccaggcgtacatgatggcccagtcatccttgtaccaaaccgctcggccgtacacttgcgaccccgtggcgccagcttccttacaccctgaagtacccccagtgcctttgagaccgccactcgtctccccagcactgtttacagcaggaaatggaacgcatccactctccacgaaaagcagcggctgaaacttgactgcagccttctccgagacggtgacagggttgggttgggcaaatggttgcacggcgtcgtgatcgatggtaccagctccgacggcagtggtgaaagcaacaaaaatggctaataagaccgtggttttcatcgtcgttgtgatgtttccagagaaatctgctgccgatgtaccccgtgaagtacgtagctcgggtctagtgtaagaatgagttggatctctaggcaccggtaagccttttgtgtacgcatttgctgcgggttctgattagttgcagctcgtctgtacgaatcaaagtgccaaccgctaccaatatgtaaaaggagttgctgggaaacatggagctctgccgtaaccagcactggtgtccagatgaacaagtgtataaactagtaatggcccgagaagacgcaatactttagtacaagtacctgagaaactagactttactaaaacaattagtgctcccatgaactaactcatcggaacagaagcgatgaaggattatgaggtacctaccagtatacacaaatcatcgctatttcacggaataataactctcgctcaacgatttcgcgctacttttcaagtttgctcggtgctgtccatgaattcatgttactgtacaagactgaagttttcgaatagataacgttcgtatttgtcgatcgaataggtttcatgatctaggtagctgacttcgagaatagccatactagtatagcagcatcctcacggcgaattttcgccccggttgctagaggggcattgcttcggaaaatgttgtatcttagcttctcagcaccacccccaagtatcctatacacactcatacttttaccaaattggtttcaaaaatatatgcacgaagtggcgggtttgcatcagattttattaaaatgaccgggcttggagtttaatatggaaaacggtataggcagcacggggaccgatgccacgagcaagcgcagcgagcactggtagacagcgcgcgtgtccccaacgttgcacacatgctgatcaactagaacttgcatgtccgagtcatccgtcgccgccataaatgaagacaggaaagaggcttgacatatcagcaagggatctcgcgccgcatctggtagttccgtcgtagctttcgacctctttcaaccgtaaatcaatgtatagtcatttgcttagtcctggtttccatgctacagtagtaaataaacactttccgaatcattataagtggctttggcgttgccaccgttggccgctgaatcgattgcaacaaatttccgggtggacatcgttaaatatcccccacagtaccagactaaatcgtgctcgagcattcagcaagccaatatattagtaaaattgtaactcatggcgaaaaattcagtcacattacattcaacaaccaccggtatgcacatttgctcttacattacattaatttaaagctcattgaagcagcgacaccagcagtgtgcccccccaacacgtaagtgcttttcacaataacacgaactcactgtaagtgatttaaaagagcttcaagatgaacgactacacgtctcactccacatacatgttcgccagattcactatacagtaacaaacatttagcaaacgctagtgttagctatacatttggcgtttgtgtgaacatgcaagaccaaaagttggtgtcagaattacacattgctactttaacttgcacaggaaatagcatgcgattttggagagcaacgacgtcttacttcctgcgcaaatgacaatacttcgtctatttatcaaggttgtcagaataatataccaaatgtcagggcaaaaagagaattctccacgttttcttcacagctacagagcatacatcctggctattgtctccactagatggcacgtctggcctagtcaccgctttctgtatcatgccaatcttcgtaatcggttgcccccgctgctgcagaactgtgtgtagcaagcgatttatagatttcttcagtcaacgattgcagcaactaatatgccaactaattctagtgctgccttcttgcttccgcatgagtggttcgtaatagttagcggtagcatagtatagcctttggatttagacttagtttgccaaggatccatcagtgtactgaccgataccttgaattaggttatctatgaataacctaatccaaataactcttcagtatgttgtttcgtacgttagcggagactttttacggagctgcctgacctctcatatgttttttacggcgggctccactgtcatttgcctccgttaccacatttaaccggagttcagccacccgttgaaaagggttccacggtccatgtgcataaatcgtcggtcgtcaactcttacattaaacttcaacgattaacgcaatcgtttgtttgctgatacaaacggggcgatcttcggttcgataaaaagttgtcctcagtttaataacttgttataccttcgaacaaggtaacatttgaagggtcgcgtttgagcgccgttcaacatgagttcgtgtgtttttaaaaagaggtaaaagtcgatcgaaatcgccccgggcaggctatgatagttcctttgccctaccccattctcaattgtaatacaggggttcataaattggagtaaacagtacctgtaaaaagggtaaaaagtctttatgtgacttgacaacctcctcccgccataggcgcctgtcagcagtggcccatgggtgaacttctatatcgtttcacttcaaggatcaaagctctggatgaggtcgtcttcgtgggtacagacgccagagtatgcacaagtaggctagcactcgcgaatgccgcgctaacaatcaatctcagttctcaatttgcagcacagaactcaagtagcttggcacattgaaaattttcaattaaacccgacttggttcacccgtgggccaacttcaacatcatgagccgctccaaggacgacgacaaggagcgctatctgacctactcgatcgtcgtgcggcaggcggacgaggggaagggcatcaaggaagaagtcgtgacgaagaagatggcgaagttcatcgatggcggccccaaggagtttttagagtggacgtaccactttttccagctcgccaagctgaaggagtggggccccgaggacaagttccgcaacaccaagatcctgctcgagggtgatctgctggacgcgttcaaccacaacgaagcaagcgtaaacgacggcgacgtgcgcatgggggacgacgacttcaccaaggcactgtatcaagcctcaatcgtggtgattccggttgactacggcgagaaaatccaagaagacctgtgggaaatccgcaaagtccgcagcgagacgctcgcggaattcagcaagcgcttgcggaccttggttcggatggagcaagtgatggcaatgctaacggggcagacagctatgccggaggacgcgctttgtcgcctctacaaaggtggccttccgtatgagtggcagtcgaagtacgacaccagcggccaagtaagtgtacaccacggtctcgtcacttttcccgtattttgagcgcatcgagcaaggcgagctgcgccagcacggaagaaacaacgggaacgggaacaagaagcatttccggccagacaataatcgtggacaaggacggcgcggtggccggggctaccatggcaacaacagcaatcggcagcagcagcagcgccgtgaaggcaaccgtggacgcgggaacagcagcagtcgcaacgacagccagaacaagtggtgctcatttcatcgtacaacaacgcacaatacgcaggagtgccgctcgctgcacaaccagcagcagcaagaagaacaccatcaggctgatgctcaacgaggcttcagtagcactcgtggccgtggcggtcgcaatagaggtggccgtcgcaacgatttcacccgcgttgagcagcgcaatcagcaggacgcaagctcaagtgatgacgaatatctgtttgtggagctcaatactgcagaagagaagtcggctccacccatgcgagcgatgataaaactggagcacgggcgcgaaaaatatttggccttgttggatagtggctgctctcgaagtctcatcaacgagaggttcctgcaagtcgcaagaaaccagaaaatgcgatggagaactctaccgtgttttttgatttggtgaaaggaagtgcctcgagtgacggatccctcgagattcgattccgcattccgaaacgcaagcgcgagtcggtgatcattcaccgctttgaagtgctttcttctgtgcgatatgacatggtgattggtcgtgatctgttggctgctctcggggttgtgctggacttcaagaacgggcgtgtgctttgggatggcagcgagatgaaaatcgagacaggagcaactcgacctggactcgtagaggtacctgagccggaccaagtgctcgaaaacgacgacgaaatgctggtaggagaagcaacggcgctcacaccagtcgatctcatgccgcagcacattgatcaggccctgcagcactgctatctcaagcttctcgaagaatactacgacaggtacagcggacgactcggccgcattcgccttcctgactacatcttgcctctgagtgcagattatcagcctttctacacgaagccctacacgattcctcgcagtcaagaacacgcagcacgcgacgaaattcagtctgctccagttggacgtgatcgagcagatatacgattcggaatcggctgcaccagcattttttcttgtgaaacccgatggatcgctacgactcctggttgatttccgcaggctgaatcgctatctgcatagctcaccgtatttcgtgcccaaaatccgtgaaattcttctccgcctggataaagcgaagtgcatgagcacgttcgacgcgaacatgggctattttgcacgtcgactagcgagagaaagccgtgcagcgactgcattctgcttgccgttcggtaagttccaattcaaacggctcccgatgggaatatctactgctcccgacgaataccaagcatacatggagcgcattgttggagatttacctttcgtgattgtttacctggacgacgtgctagtgttctcggagaatgaagaggaccatatcgagcatcttcgcattgtgtttgagcgtttccgccagttcgacgtcacgctcatcgcgaagaagtgccatatccttcgtgaagaagtcgattacttagggttcacgctgactcgggacggaatccagccccaaaagaagaagatcgaagccatccagcacattgcagagccccgcacgaagaaagagctccgccgcttttaggaatgatttcctactaccgcgaaatggtaccaaacaagtcggcgctgacggcccagctcaacaaactcacctcgaagaacgcgccattcacctggcccagaacatgcagcagcgttccaagagatcaagaatgctctagctcggaatgtgtggcttgcgttccccgactacagcaggacctttcacgtgtttgctgatgcaagtggcagacaaataggtggggtcatcattcagggcaagaggattctcgcttgcttctcgcgatcaatgacagagacccagcaaacatattctacaatggagtgggaacttttgtcaatcgtcgagctgctgaaggagtaccgcgcgatgctactcggatttcctgttgtaattcacacggaccacaagaatcttctctttccgcaagaaaactctctgctggaaactcctgcgggaagagtatcgcctcactgttaagtacgtccctggagcgctgaacgtgggcgcagatgcattctctcgactccactacgactacgtgaaacagacgatagaggaggagctcctgcgcatcgaggaagaagaaatagccatcgacggcgcggtgatcaagcgtcatcaggcagaagaccccacgacgaaggagattctaaaccggttggtgtgccgtggagctgatcctgattattctctccgcccgactttaggcaacgtattgctgtactacaaaaagcgtgttggcatcccaccgtctctccgccatagcctcatcgagctatatcatgactaccttcttcaccccggtgcggaaaagcaatttcgcagcatggctacattttggtggcccgagatggagaaggagaccctggactacgtcaaggcctgcgtggattgcaaacgagcaaaactacatggggtaagcagaaatacggccgcattccacctacgccagcgaccaacaacgacaagccttttgacgtcgtgcatgttgatcttgtcggtccctttgacggtgattactactgcgtgactatgatcgagaggcagttccgctggctggagctgctaatgcagaagggcaagacgtcgaagacctctgcgctaagcttcgagagagcgtggctgtgccgctacccgcgcccaagatttgttatccatgaccttggccctgaattcactggagacgagttccagttactgctgagtaccatggctatcaaggacaagccaattacttcgaagaatccccaggccaacgcgatctgtgagcgcgttcatctcgagatcatgaatatcttgcgggcccgaccggatttgcacgaccaactcgaagtcgcttttgattatgcagcgtacgcaattcgggctagctaccattcgattctccgggcttcgccggctcagctactcttcggtgaggacatgatcacgaggcaattgcattttgccaattggagctatttgtcaaagcaaaggtttgcagctatcctgcaggacaacgagcgcgagaacatgaagcggctcgagcatttctactgcgtgggagatcacgtcatgcttcgtattccagcgcgcgagcgtaagaagacgtaccaggttgcaaaaggaccattcatcgtgaaggaagtgttcaacaatggcactgtcctcctggacaccggaacgacggagtatcgagcgaacatccgccgcattttcccgtgttgattgccatctcggcatgggggagaatgacaacctccttccgcacccagtcgccacgggcgcctgtcagcagtggcgcatgggtgaacttctgtatcgtttcacttcaaggatcaaagctctggatgaggtcgtcttcgtgggtacagacgccagagtatgcacaagtaggctagcactcgcgaatgccgcgctaacaatcaatctcagttctcaatttgcagcacagaactcaagtagcttggcagactggctcgttcttttgggcaaaaccaatggccgatgcggttccgatatttttgtcgctgtcgacatcccatcacggttattctttggcgcttaaatcattcttgttggtttgggtacattaagaagatgcgttcgattcccgctttatctgacttctcaatatatgtgaactaggatgctgcttactcgacaacagtgcggaacaccacaccggtgcggtatgctagatgtaattgtacatgccgaagcttgaatcagtttgtatgcctgttgatgaagtcgcctagatgtctggaatgttgaagacgccggacaggtgagttgaatttggtcttaaaaaacgccgatagttggagctgaatgagctcttgatcgttgatagcgctgtttcaaggggttccggttctccgttctcgaaacaaagtgtgtttctctccgtccattggcgaggaagtgccgcgcacctcactaaattgcataagcagagcactggttctctgcagtggtaccatgttgcccgaatttgctgcttgtgagggagcaccatggtcgttcaactgatgtctcctacgaaaaagatactccagtccttccggagggcttcccaaatttcgtttgagtgctggcactcgagaaaaaagatattgcgtagtttcgattgctgtgcagccgtagtatggacactgatgaacatttgccttatctggcgcgctagaaaccaaaagcacgaactgcaatttatgacaagctgagagaagaaatcattcttcaccgctgcaggccacccagcaagcatgcagcgataccggacaaaactcgaaacccgagggagggtgcttgatgatcacggaagtcccagccacaagcgttacacagagcggcagatgaatccgttcgcattcgccagtacttcttggcggcgtctgtacatcaacgatagagggtctgggtgaagaggctacctttgtgagattggagcacctaacgcgaactcatgtggtcgccggcgaagagaatttggtactcgaacaccctatcattgcgtatgtctgccgattgtttcaactccatcaccgcaacaattgccgaggtactcctcggcttgatagccaagccgataaatggactcaacgtgcggttcgttttggaagggccatcacgttgcgaatggaaactacgaaacaagacaattctccttgctgcaggcccacatggacctattgtgacgctgatcacgaagcatctcggggaaaacctggagagtgtctttgagttgggacttgagtaatgtagacgtatgaattgttaacgaagtcccggcttctgtgtcagcctggtatctggtacccctaaagggaagtattgtctgttggtatcctctactgctgtatcaggctcccccagcgtttacatcgtcaacaaagtatgcttcgcagaactttgttaacgctcgacccaaggcgtaaaaccgcatcgtggtctctgctagcgccataatgccgcgttcccggacttgaagctttgtcgtggctgcgtgagcatcgaccacaagcaagtggaacgaagtgcagcagtcttcgatcgtaatgacagtgatctgttcatgcacgcgctcaagcctttcccacaatgaagagcacagcgaaatcacttggtcagtgttgccttgcaatgtctccgtcccctgccgagctccaggggtagagactgcatccgtgacatcgtctggtaatgtcgagcaagaacatcgcttggcactagataccaggactcgccagctcgccaaccaccttcgaggtcttttgcgttttactccgttgggcgggaccctcattgggctttcgacgacaggtttggccagcctagccagctcatgtcgggctgcagcaatcatgtcggggacagaaactcgattcgtgacatccgctgacaaggtgtcgggctcggccattgcttgggtattgacgccggagttcgccagtctggccagctcgtccaccacagtcgatattttaatccgctgcttcgggtccagcgcgcacattcgcacgaccaattcccattgactgttgctgcacttaggccgcgccggtagtgtgccgtgggtggcatggtatctcacgacgtttctgtcagcaacgcgccacggcaggcaaccgcgagagtctttgccagtgtttactgcctccacgacccgaagggcttccacgacgcacattcccacgtccccccccgcgtcgagcatttagcgcggctctactggcaatgcaggactcttgccgatgaatgtggcgtcatcacatggacgcaccattatcgctctttcaataaaaccgcggatgcactagcgaacttagcgatggacaccaaggtcagtcgccaggtgggaagcgctgacactgggataccatcgggctgctgggatgactcgctccggcacacacagatggatctgaatgagtggcaaactgacatggatgtcttgtcacaacgcacgcccaggaccggccatccttaagaagaagaggctgctgtagacagctaacgacgtgtatgggcgttagctgcggatgttggtgatcgctaggactacgcactaaatgaacacaatatacctcacctgcaaaatgaaatgacgcacatgcccagcgaattgacatctgatgcgaatgttgggcccgcttgctgtggtatttctcctgccttgccgtccgggaaacactcgggagccacccagtgccacgcacctgaaatctgcgcaatgtcttcgctgctagcggcagagctgagaccaaagtccgtcacttttgctttgatatccaagacatactgctgttgtctatgagcctacaacagctatcgagaaaaacctgcaacacaaaatcatttcagggtttgacgtacttaagtactcgatagtagtgttggcattgtgcaatttccatatttttcgtaatagttgtttcgttttgctggccctgccactcttaccaaaatttcccggagttactgtgcagtagcttcggagaattcacacaacaccgaagtaaatttggggttgtgtgactacagtaatgtgcgtcgataagggacctctgatatgaataggagtgtaaaggctattaaggcgaacaagtggaaaaagaaagaacaatgtattgatttagttaagaataaatgacacactgcttttactaatgtgcgtggagtgcaaccagcacttctgaatcgtagaagctgacacattatcccacgcagtctcgcatcacttcatggcagttagtaagtcaactgtatgtctagggatgcccaacttcttggctagcaccgtagcatagaagacgatcattgcaccgctgaggcaaatgccctccgcctctgcaagcatgatgaactcgacgatgttttgatcgatctgtagctggaacggagacggcttgttcttgcgctgagcactttcgtgaggctggcgcaacagcgcgatacgccccgagatgatgcggtcgatggtggttttcccagggggccttagcagaccgaactcgactttggcccaaagggccaggtcttcatacttgacagcgggggagctctcagccttcttgatcagacgcagcttctgctgctgggtgaggcgagttctagtcttggaggaggagctcatgaggtgggtggatgggtagggcgctggtgttgtggcagattccgttgtgcttggagatcgcgccgagcgggttggagggaaggagttatgttcgcgcccgaattcaaatggtagcttcaatcactgattggctagatctgacctcactagccaatcacaagtcgcgctcgttgcgaaaccagccaatagtgccaggatcctgtcgaaagttaactcaaatcaatgttagctgtgttcttgactgacagatgtatataatgtatgtaaggatattagttaccgcacgtccctattgacgcacactagcgctctgggcatccgctacgcgggcgctttggccacgggttgctggaatagcatagcttaaaagtatatgcatcattttgatttccataacaataatgtgcggatacagttgacacatattcgttgctataacttcgtgctttagtagcaaatgagtaggactacattttcctattaagctaattaccaaatgtcgctcacgatgcaaagttgagtacctaaacatcgagtgagctgaatatcgttgccgttgtattattgatcacccgtttctgcgaggcgagctacatttgtcacggacatgccttactacagtgtagtgacttgcgtgtttacttactttgaagtaataactaaagtattgaaactatgattgggtgtggtttatactgcgttgcaaactggtagctgtcgtcgataccgtactctagtgttgttactgcgttagcactgaagactgcaactttgccagcatgaatttacgcactgcaccgtgctacatgtagtaatgctggtttgcgcgataacagttcaaatagacatagcaaatttagctcaactcagtacggatcggtagcgactgtgcgtcttcgatggttaggttgttgtgtatcgtgtatatgcatatgaagcgtttggcgggaccccggggtccccgcttgccccaccagctgtcataagcaaccggtatattcggtaaattcaagtgctgcatgattgtatcgatgctatgtatctctggtagtatcgactatcgagttacacagagctgcagagttcgcaactttgcgtacccgacgccgctgctgctgtagtaggcgctagcttctagcagtcagcttgaatcttcttggtcgtatcttcatcaagacgcttaacagaacgaacgaatgcagcagctttgtggtcacgacaatttcaatacttaagtatcacgtttgcgccgaggaacctctgcacctccagttcgcccagacttcatactggatgctagatgcttgaaggtgaaatgagctctagctaaactcgaaaaattatcacacgcttgtcacaacatatatattatcactgccccgccaataaaaataaataactccggtcgccatcggtacatgatgcgggaccccggggtccggccaataacttcatatatatattgctctaacgacaatgtctactgaggcgaggccgagaaacctttgtcgcccaggggggttcgtatagcgcagcccaagactgtttctcaggggtagacccagagaatcgacttgagagtcaacagcaagaagatagactcagagattcgcagccgcaaagctttaaaccctgagaatcacactccttggtcggcgtgggtaccttgtgtaatccctgtcggctcgtttgtcttcgacggaacggcactccaccggttgaaaatgtagcctcgaagaagtgcgggagcgcatgtctacttcagaacgcacctccacaccaaaaggcaaacccagagaatcagatcccctgaaacccagaatatcacgaattcagggtccaggatttcagtcaactctgggacttggaactcagaagacatcttacccaaatgccctcctagctcgataaaaccaacaaatacagagtatacaaacactacaactagccgtcacttattcttttggacccttggacggtgggtcacacacacactaggctcactcgagtctgaaattcagggacctagctcccctgagactcacacaaacgcgcaccacctccaataaaggaggaaaatacaatcactatcagttacctttcccttcacacaagcagtcaatacaaaatcctggaggcgaccacctagcaccccagaataccctctggaataatatgaaatgggctaccacgagcacagcaagtgacccaactaggatatggaatagatggatcaccccaggaagctcaaggtcgtcgctggtcaccacctaactggacttgagtttgatggagtccacacagacggctgtccttcgccgttgatgtgcccttagcgtcccgcggtcgtagtctcgggtcctccggatttccgtcggcaggcttggccgaagtcacttgcgcagtacagggtaaaaggaactctgtttggtttttatcagctacttctctctctctctctcttcttcttcttcttcgggcaaatatcttctgttcactatgcttggggtcacaatgtcttgtcttgagtataccttgggatcagcggtccaatcttgcgatcggcttgcgaatccattgtcgtacggcgtcgaaagtgtcaattgtgggtccttagacttggtttagtatggtgcaggactccctctcgactcttcgaaagtatccagtctgtgcatccatgtcggttcttcaaggtcacgcatcattttgattgcagactggcttcgaactggctcgaatacctgaaaaccaggtgacacccagggtcatcttctgaaatcctgggaattctgaggaatattggggaactgtggggattcttgggtgttggctcgggaaacacttaagttcagtatagagaatctggatttatggtcctaaaccagataatcatctttggaactctgggtcacctgcactcagggaggtgaactctgggtcatcgtgcggcactctaggtttccgtgcggcactctgggtaacaagtctgctgcagtgcagactcgtgtgtatctcctcaaagccacacttttagtgggtttagcggcctcctgcgcatgatcatggtagtagtgggatgattctcagggtaatttgatcctctggggcactctgagccacagcaagatgaggcgtactctgggatacattcttcagagacactttccgccagactttaggcactcatcgtaagggaaattccgcggctggactgagtgttctcttaaattctgggcgtgcactcccaggattcacacttccagccagttgggcccatctgcggtcagacgctggattcatcccgagaaatcacttctctcccacagtcgccatccatgtcacacgggtacagccgcgccgtatcccagtcatccaccaatcagcatccgatacaaactccaggtcacagaggtgacggcacatcgttggcaattttctggggaccgcctcgtgtcactacactaagctgcattatgtgcatgctgcagtagtttacggtacacgtatctagggtagcagcgcgcatctattttgaaagctgcatgcgttgccagtgtcactactattgtacgctttgcctactctgcatctttcatctggatttataacgcgttattgctcttggtgcatggcgtacagaacttagtaacagtaattcgaaattgcgcacgaccatgctgttgtgcgctgcgcgcaattcgagcagcattttctaaaattgttttgttgaagcgcgagagttagggcacctgggatatgatcgattttgatttgagttggagtgcattgttgtcacttggctgatgcgactatcgttcctatggaagcgagtgtcggactgcagcaagatcctgccattaatcagcttaataaaaacataaaaagtcgtaagtatgacacctcaatgcgcgcgctggtgatgcacctgggtttacttaattcgaccaactactacgtagtagtaacttaagttgagcacgcgactactcaaattggtgtattataatgcttgattcctgcaaatgaatacagcaagattgccagctacaccacgccgcgtgctgtttatcagttaatctatgtgcagcgttaggtggtcaaaatgcgtcgttcgcacacattcttggtgtattagaagatgaacacctaataagcaccagtctacccctaattccgtactgtaatccatcgactgccctgaaggtaccagttatcccaacaggcggaactcccgaaaccgtaaagtagtttatttatgtagatgtatgcatgtactcactgtagcagtgtccgctgccgctgcactccgctgctcactcccgtacgccacgcgccctcccgctcgttgcctccaccgcgcgccaactttcaaaatgggggatgtgataatcacacccgttatagtccgaccggtaagtccgaattttagagtgattgtggctattgttgtaatttcgtcgacagttaaaaagccagttccagtcgacttgatgagtgaataatgtatgcaataaggccgcggtagcgtagtctaattgacaggtctagactgtaggggcggaaagcatgacgcgatgaccgacagacaggattctcggttagaggacggagattactgtaccccagattttgtttttgaaattacggcatatattcacttgcgtaggtagcttggtacagctacaagaaatggagctccgtctccaggctgcgcgtaagcaacgctacgctgcggagtgtctgcggcttcataaggggcaaaagcagccccccccccccgatttcggatcattttggcgaaagaaaactaaaacttgcaccagtatctgttgttattatccatcgcagtctacagtgcatgtagaacgctttgtcgtatcgttcgatcccgcaagctgatcctaacttggttacattacaatcgacgctacttactattattttatgattcctctctattagccaactttgtactaatacgtggtaacaacatgctagctaagtattcacacgaaagcgaattcgtaagcttgcatgttgcccaaaagtatagtatcaaactctacaccttttcaacttcaaaactgcaaattgtaagttcaaaacagcaaaaggtaagttcaaaactgcacgagcagagaccaggccagcttcgtacttttatacacagctcattggttggcacgcagcatagctagccaataggcaaattgtactctataatcgtatacgatgatagatatcattcagtttgtaatatacatttatagagtattgttgttttgatcttaccttttgctgttttgaacttacaatttgcagttttgaagttgaaaaggtgtactaatcaaaaagtaatagtactacaagtaagcacaaggcaccggttgtcaacacgcaatttatatgaaaccgacaacttgatcactgtcttctacatcctgcaggacgtgtgccacgacaagacccaacatatcctttcttcgctgggactttctaaaacggccacgccttcttcagcttcttctcgaaagtgtcgtcgttaatcggcacgtaagcgaggccgaagtccgtcgtgttgagtgccagtcgcgctgcctcgggcagttgctcccacatgatcagaggctgggagtcgccggtcctagagctgtaatacagcttcggctgccctgcctcccgactggtcgagcgaaacaggagcgtcgtcgtgccgtccagaatggcatagtccggggctggtgtcttcgtttcgtagtcgtcatcgctcgtggaggtcgaaatgcccaggatcttgggtgccgcgaagtccggattgtcgatccacacgacagcgctagaccagtcgaagcgcctggacgctacccccacgaagaaccccttggggaagtaccaggcgtacatgatggcccagacatccttgtaccacatggctcggccgtacacttgcgagcccagtggagcgctatcgcatgcggaatttcccgagttccccttcagtcctccgctggtctcgccagcagcgttgaccgcggggaaggagacgcatccgtcctcaataagcaactgcggcttgaacttgactgccgccttctccgagatggtcacgggatccggctgaggaaatggctccaccttgtcatggtcgatcttgccggcgtccactgcgatgaacgcagccgcgaggataacgaggaagcctcggacgttcatgactcacgcggatggttgtgcagcacggggggaaatcgaaactgagctcatcctggagcctgagcacacgagcagcctcaactcaatgtgtgcagaagtgggttccaagataaccaatgcgatgtggtgaacagcggacgggttccgatgccttcataaatgtatgcattgtcaaagcccacctgatcccctccctatcgtgaaaatggtttcgcaggtgtcggcgcttcctctacaccaagcgggaggatttatgctgattttgaccccgactcaagagtgtcggcgctttctgcacttccatgtggagatatagggcatggctacacagcgatgtcttaccctcctggtgagtgccaagtcggcaacgaaacgagtagaataatttacaacactggcaacgcaataaatattgtgaaagggtgtcttgttaaacttctacgaagttttgttgacaatgtgccggtgtacgtgtatttgccgagaaatgtttttgtctggttgactgaccatcctcatagcgcagactttgatggcagggtatgaaaactgtgccgtactggtaggccctaccgcggacgccctacggtagggcgtccgcctccgcgttacgtcattctcaggtggaggagaatcgcttctcgatgcctcttcacaggcattctacatgtacagcaacccgatcattcttttggataaattaaaaattaaaagttttactttgggagtgtccgtgcgcccaagcatgctggaaataccttatcagctgctggagtagacgaaggtgtgataaccagcagcttcttcggtatacggcgaattgcgcgtctcgagtatcaccaccgtttacaacagacttgcgtcgtcgatttagcagcgcgtttcccgacgactacgcgcatggtgggttatgagcacagtctgcatgacagtcctatggacccaacgaaaccaagtggttcacaatgggagccagcttaccattgcaagcagcgtcgcagccattccaacaggctggactccggcaactacaagctctagcgcgtagggaacgcagaaatccgaggacaatagttcaaggcacaagattacttatctgcttggatctcttccagcggacaccaaggcgagccacgtacagccaccgggatcatctcagcctgagatcctcaggtacctaaccttaccgtggtttacttattattttgttttaaaaaacaaaataatatgtaaaccacggtaagtgcattaataaattcatcttgtgatgaatttattaatgcagcgacctcagctaaattggcctaaacttcaggcaacagtccgctcggatgacatattctggccacgatcttttcacgctgttagaaagtcttgactcgagtgtaccgctgctcgcagataacctcaccagcgaattgttcattcatgcccatcaacagaatcaaacttctgcttcgccctcgtggactagaaagtgagcttcgcagaacttggtcaacgctcgatccaaggcgtgaaagcgcatcgtggtctcagctaacgccatgatattgtgctctcggccgcaaagctttgctgtggccgcgtgggcgtgggctacagtcgagtagaacgaagcagagcagtcctcactcttcccgccggcgatctgttcgtgcacacgcttaagtcgtttccacaacgaagcgcacagcgaaatcacttggtcgtgttggtcggtgtcgccttgtagtcgagtcatctccttctgagctgcagcaatcatgacggggacggaagcctgattcgaggcatccatcgcttgactcttgataccagggttcgccagtctggccagctcgtccaccacagtcgagatcttgatccgctccttcggattcaacttacacatccgctcaaccaatttccattgactgtcgctgcacagaggccgcgccggtaagttgccttgcttagcattgtgtatcaccacgattctgtcagtaacgcgccatggcagacaactgcgcgagtctttgccagcttgtaccgcctccaccagccgcagtgcttccacgatgcacatacccagcgaatagatatccgacgcaaaggatggtcttgcctgctgccctgccttgtcgtctggaaagcactcgggggccacccaaagccacgcaccggaaatctgagccgtgtcttcactgctaacggcggagctgagaccgaagtccgtcaccttcgctttgaggtcgctccctatcacgatgttattcccttttagatctccgtggaccacgtcgcgtgcgtggaggtattggacacccagcgcagcctcgtgcagcttcgaccacagctcatcggtatggctgcgcaagtagctgaccaacgttccgttcgtagcgtactcgcacacgaagaacggtcgcccgacgtgacaggcaccgaagagtcgaatgacgtgagggtggctgaagccaaaccaaatgtcgacttcgcgacggaacatcgcaatagccttgcttctctgatcagggtccgaatcggcttcagacacgtacgggtcctccgatgccgataaactcgaccatgatgtcgaagcatccgctctgccactcgaccctggcaacgttacacgcttcaccaccacctccgagtccagccacgtggctcgattcacgctcccgaagcctccttcgcccagacaattccactcgtccacgatcaactcgtaccatgggatgaaccattctggtatgagttccgcccaatcttccgtctccaacttgctggtgatatcctcgtacgccttcttcatcatctttagtacctcaggtgtgtatttcccgagagggtttcccatctccgccttcaacgtcttgagaaatgcagcccgttcctccgtcgtcttcaacttttgcagcaaaagaaaagtgtcagatagtcctgacacgagtagcttggtctcgtcatcgcgctgttgccgccatcgtgattccttctcggggggtgcgtcctcactcactccatccaatgacgccataagggactcgacacgccactaaaacgcgtacaggctgttggtggtggcacgcgttgacgacaagtgcatcattagagcttgatctggtggcatccgaaccgcttggttaaactcggtgagaagcgcgtgaaatcgccctagcagtgctgggcggtcagctgacactcgcagacgttcgtgtagcttctctagttggtcgaacgctttgcagtattggacgttgtcgcacgtttgcatgtacttctccagcctcagccacgcttcgccaactcgatcggacttataccctcccatggaaaaaccgggttcattctccggttgggtgcagttcgaatactcctcggtagccaaacgctcgagcttggagacgattgacgacagacttgcgcgttgccaagggtcttggctgcacattttccagactactttgcctgcgtcagcgcgaggacaggaaggcgcaatttcactcgcagtgtaagtcaaggagtagtcaggagagttgagcgcacaggtactgtaggagcgtggccgccaagccaacttctcaatcctcgcccactctccgctctctccgccccacggcatctctttgttcgcggcttccatgatgcacattcccagagaatacacatccgattcgaacgaaggtgacgctccttctagaacctctggcgcctgccagcgcatggagcccacgacactgcctgacgctgcactgggacgcttgatcaagccactcagtccaaaattcgacagcttcgccatgccatcgctgccgatcaagatgctgctgcatcgcagatcgccatggactattcctcgttcgtggagatactccagccctagtgcagcctcgtagaggtacttccacatcgtcggtttctcctctgctgaggacttgacatgctcgaggagtgagccctgactcgcgtactcgcacacgaagaacagcaggtgaggaccagcattgcaggcgccgtatattttgaggacgttggggtggcggagctgctgccacacacgcacttcgtcctcaaatggagtgtgcgacgcatctggaatgaatagcttcacgaccgcgtcggcatcgagccacttggcctggaagtcgcccccgatatgaacgttctggctgtagtgagtgagctcgagttccgacggatgaatggagcagctcgacggaaggggggctccatgtagagtagcatcggcacttgctgctgtatcagtgacccgggatcgaataaatggcaggaggacttgttggatttcctcatgcccactttcagcagcaagccggagagctgttgttccattagcgctcgtagcattcacatccgcgttgtattgctcgaccagacattggacgacggcaatgtgtccgtgctgagcggccttcatcaaagctgtatacccgtcgttgtcgtaggcattcagatcagcaccttgaccagccagatactgaacgacatgccggtggttatgctcagcagccaccatcaaggcagtgtagttgtccttgtgtctggcattcacatcaacgccacagtgttcgtcaaggtatcgcacgacatcgacgtggccatatcgcgccgccttcatgagcgcagtgactccgtcattatccttggcgttcacgtcagcgccacagtgctcagcaaggtaccgtacgacatcgacctcgttattgaaagccgcccatattaacggcgtggctccgtcgttatcgtgagcgttcgcgtcagcgttacattgctcagaaaggtaccgcacgacatcaatgaaacctcttctagcggcccaaatcaaagctgtgtctccgtgattgttcttgacattcatatcagcgccacattgcccagcaagatatcgcacaacagcttcagctacgtgaccttctcgagcagcccaaatcaacgctgtgtctccaccctcggtcttgatactcacgtcagcaccacactgctcaacaagaaaccggacgacatcaatgcggccattttcagctgcccatatcactgctgtgtatccacattcgcctttcacgtcggcgccatatagttcagtaagataccgcacgacgtccaagtgttgagcttcagcagcgtagatcactgcgttgtattcggcgtgaaactcggccttcacgtccgtgccacattgttcaatcagataccgcagaacatccaggtggcccttgctagcggtccgagtaaatgctgtgtaaccgatattgtctttcccattcacgtccgcgccgcattgctcaaccaggtaccgcacgacgtacgctcagccgcctctctaaatgcagtgtgcccgaaattgttcctggcgttagcgtcggccccatactgctcagcgagacaccgtacgacgtccacgtggccacactgagcggccagcatcaacgctgtatatccgtcagtagttctggcctccacgtcagctccaggttgcccggcaaggaatgacacaacctccgcgtgaccattttcagcagcatatagcaaagcggtgtactcgccattgttcttggcattcacgttagcgccacattgcgcgtggaggtaccgaacgacatccacgtggccatatcgagtggcctcactgagcgcagtgttcccgtcattatcgctggcgttcacgtcagctccgcaatgctcagcaaggtaacggacgacgtccacgttgccgtatcgagcggcttcgagcagcgccgtctctccgttcttgtcctcggtattcgcgtcaactccgcaccgttcagtcaggtactgcaccacgaccacgtggccgttcactgcagcccgcatcaaggttgtgccaccgtcattgtccttggcgtccacgtccgcgccgcagtcctccacgaggcaccgcacgacgtccatgtggccgctgaacgcagcccatatcaacgccgtctctgcgttgtcgtccttggtgttcgcctgcaccccacagtgctcgatggggaacttggtgacctctatgtggccattctcagcggctctcctccctcccgtagcttgagacctgccccaccagcccctggacgctcgcgagggcgccctccgctgcagctttggtgatcgcctccgtctccgtctgcatctgctgagggtgcgtcgagaatgaagactgatgcgatccggacggacggggggcttctcatcaggtgagccatcgctcgccagaaccctctggcaatctacaggcagacgaggaggttaacgcggctgcccccggggccacacttcgatatggggacggactcagacagacgcgcgcccagcggcgaagctggcggacaatgaggttgccctcatgggctgcgtcccccaaattgccacaagtaagtgtgattttaggatctggcagttcagagttcgagctgaatctggtattaatacagcattaataatactaccgtagtacatgtgcttaagggaattacttttttttggaacacctaggctgtgctcatgagaactttttacgggtgccgtgtttggcggcttcgatggtaacgcggacgcgctgatggtcgcgtaggtgctggttgtgccgggcttggagctgctgctgtcggtcggatgagctgccacgagctgctggagtttgccgtccacgccaagtcgtgtaagcgaacgatacgaagtatgagctaagctggccgtctgtctgctcatgactcagagtctgggggtggatcgctccctcttgccagtcttcgtttcgacgcgcagtgagcagcagatggagacggaggagcttaggaacgccgcgcgagagggcacccccgcgagttcaggggttcgcggcgcgggtctcgcacggtgacagggaggacgcgatgagggatgcttcttcgaatgcccacctgcaggttgtgatgtaccttgtcgaggaatgggcggttgaagcggatcccatcatcctcccagacccacacgtcgaagttgtctctacattcccagaggctggtgagaatggccacctggatgtggtgcggtatctggccgagcaatgtcgtgttggcatcaccgagtacggtaacgataaaacactattcggagctgcacggaatggccacgtcgatatcgtgcggtacttggttgagcattgtggcgctgacgtcaatgcagtagataatgtgttgacacttgctgctgagaattgtcatgtgggtatagaacgatgccttggtgagcaaggtggcactgacgttaacgctgtgagtcgttacgacgggacagcactcagcaaagcggctgaaaggggtcacatggatgttgtgcgctgtctggtcaagcactgcggtgttgatatgaacagcaaggacgattccgggctcacaacatggacacgagttgctcagaagggtctcgttgatgtcgtacagtgtcttgtcgaagaattcggcgctgacgtggacgccaaggacgatcccggatgcacagcagtgatacggggtgctgagggaggccacattgatgtcgtacggtgtcttgtggagaagtacggtgctggtgtgaaggcgaggagcaatgacggagacacggcagtaatacgaggtgctggaagtggtcacattgatatcgtacggtatctttcgaagcgatgcgatgctgacgtgaacgccaagaacaatgacggaaacactgcgctgattgaggcagctaaagggggctgtgtggatgtcgtccgataccttcatcgccgatgcggttgatttgaattccaagaacaatggcggatgtacggctttgctggtggctgccgattgttatcagacggatattgtgcagtacctcactgggcggcgcagcgtcgacgtgaacagtaagtggagtgatggagcaacagcaatgatagtggccgctcaaaagggtatttgaatatcgtgcggagcctcgcagagcgaggtagtgctgacgtcaatgtcagaaacaatgacgggtatacagcactaattcgggctgctgaagatgatcgatcgcacggatatcgtcgagtaccttggaggccgatgtgcaggtgtgaatgccaaggataatcacggatacacagcgttgatgaaggccgctcagcgcgggaatattgccatcgtccaatgcctggtcgagcaacaccatgcagacgtgaacgctgtaagtaccaacggaactaccactcttcgacttgctgctgagcgggggtattatgaaatccagcgagtcctcatgccgtttgatcgacccgatcttaccaattctactcgagatggagcttcccttctactgagctactccattcatccatctgaaatcgagctcacccactacagtcaagaccgccagatcgggggcgacttccaggccaagtggctcgatgctgacgcggtcgtgaaagtgttcattcaagatgcgtcacacactccatttgaggacgaagtgcgtgtgtggcagcagctccgccaccccaacgtcctcaaaatatacggcgcctgcaatgctggtcctcacctgctgttcttcgtgtgcgagtacgcgagtcagggctcactcctcgagcatgtcaagtcctcagcagaggagaaaccgacgatgtggaagtacctctacgaggctgcactagggctggagtatctccacgaacgaggaatagtccatggcgatctgcgatgcagcagcatcttgatcggcagcgatggcatggcgaagctgtcgaattttggactgagtggcttgatcaagcgtcccagtgcagcgtcgggtaatgtcgttgggttcatgcgctggcaggctcaagaggttatggaaggggttccaccatcgttcgagtcggacgtgtattctctgggaatgtgcattctggaagctgtgaccaaagagatgccctggggcagcaaaagcactgatgtgatggggtacaaaagcaactggaccccggaagatgaatctactaaaaaaggttatgctgccgacattgctaatggtttccctaatggttgctacgcaattctttactattcacctggctgtctcgttggtgatgctcgcgaactactgtagtgtggaaaatgtgctctcgagatcttcgtaaacgcatttctctgtcttctgtcgtaaaaaaacttgagcgtttgactaccggggagtattcgagcttcgagcaagctgagcacgaagcggttatctcctttgaagagtactgtacgagtccggtagagctcaagaagcgtggttggggctggagaagtatatgcagatgtgcgacatcgtcgaatactgcaaagccttcgaccaactaaaacggctacatgaacgtctacgagtatcaccccaccgcccagcacgctaaaggggttccacgcgcttctaattgagtttaaccaagcggttcggatatcgcctgatcaagctctaatgatgtgcttgtcgtcaacgcgtgccaccaccaacaacaggtacgcgtttcagtggcgcatcgagtccctcatggtatcactaggtggagcagtggagggtacgaccgttgagagggggtcaggatggcgccctgacgagaccaagatgtgtgtgtcagggccatccgatatttttcttctgctgcaaaagttgaagacgacggaggaacgggctgcatttctcaagactttgaaggtcgagatggaaaaccctctcgagaaatacacgccagatgaacaaaagatgatgaaaaagacgtacgaggttatcaccagcaagttggaggcggaagactggtcggcactcataccagaatggttcatcccatggtacgagctgattatcgacgagggaaatcgtctgggcgaaggaggcttcgggagcgtgaatcgagccacgtggctggactcggaggtggtggtgaagcgtgtaatgttgccagggtcgagtggcagagcggatgcttcgacatcatggtcgagtttatcggcatcggaggacccgtacgcgtctgaagccgattcggaccctgatcagagaagcaaggctattgcgatgttccgtcgcgaagtcgacatttggtttggcttcagccaccctcacgtcattcggctctttggcgcctgtgacgtcggacggccgttcttcgtatgagaattcgccaccaacgggacgttggtcagctacttgcgagagcatcccgacgaattatggtcgaagctgcacgaggctgcgctgggcgtccagtacgcgacgtggtgcacggcgacctgaagggaaacaacatcgtggttgggagcgacttcaaatcgaaggtgacggacttcggtctcagctctgccgctagcagcgaagacatggctcagattttaggcgcgtggcactggctggccccagagtgctttccaaactgcaaggcaggagaaccccaacagcaaaagaggccatctttcgcatcggatgtctattctctaggtttgtgcttcgtggaagcactgcgggtgccgtgaaggctggcaaagacggtcgtagttgcctgccttggcgtgttgccatgctatgcatggtacgctgcccacgcggccaaagtgcagtggcagtcaatggaagttggtggaaggaatgtgtaagttggatccgaagcagcggcttaaaatctcgacggtggtggacgagctggccagagtggcgaactccagcgtcaaaacccaaacgatggccaaggccgacacttcgccagcggataccacgaatgaggttactgtccccgtcatgatttctgcagcacgacaggagctggcaagactggccaaacctggcatcgaaaactcaacgagggcccagcccaacggattgaaaaacaaaagttctctaccaaggtggttgacgagctggcgggccctgatgttcgcagccaagacgttgtcctgctcgacgctgccggcggatgtgatgaatgaagttcataaccctggagctcagcaggggactgacccattgcaaggggtgtcgtgccaaaggcttcagcaagaatgaggagcaatgaggagctcttgtcctccatttccagtgctggacttcacagggtggggaaacgacatgtgttcatgtgaggcaggcgaacttgccgcctcctttccaacagggaacaaccagagtgcaatggccaggacaaacaatgaatagtattcatgcatgaagttacattatttttgatgcagggcgccactcgagtcgcgctcacaaccccccaactactacagcactctaccacgaaagatccttggacgcacccgctactgcggacgccgggatctcctccttgctggagcagccaccgctgctgccacagctgcccttctcagccgcggggtcctgcaccgccacacggaagagacggttgccgaacttcttgtacagcggcatgatgcctccgccagcgagcagacgctcctcgaagagcgacatgttgaagcggaaggtctcgccgcccacctcaatggtgcggccggtcatgttcaccgtgatgtcagcgttctccttggccagctcgtagaagcggtcgtcgtcgagctggatgcccagcagactgaagttctggtaattgcgcgagaagatgtagccgaacgagcgggcgatcagagcctgcacgccagctcccttcatggccgtcacggcctgctcacgcgaggagccgcagccgaagccgtggccagccacaaccacattctggccctgcttcaccttgtcacggaagtccgggttcgtgtgcaggaacgcgaccttgcccagagcctccatgtcgttctcgcacaggaactcaccaggcagaatggcgtccgtgtcgatgttgtcaccgaagacctggacgcggcccttgatggagcccgagaacgtctcgagcgaggcagcggcctcagcgtccgcgttaccggcctcctcaccagcaacaggaagctccggagcgacctcagcgatcgtgataggcaccgacggctgcttgggcacagccgagttgaacttctcgacgtcgatgagcttgaggaacggcgtagggtccgtcacctccatcgtgaaactggaagcagccaccgtgatggccgacgcaaggttggcgatggagcccttgcccatgcggttgcggtagttgcggttctgcgagctgagccacacctcgttctcgccggcaacgtcagcggcgatacccaggcagaaactgcagccgggggcgcccacaacgaagccagccttctcgtacacgtcgatgaggccgtgtttcttgaggttgtccacgatgatctgactgccaggggtcacgcgacgctggccgtgggcgacgggcttcattccctgcttgaggcaagcctcgagcaccagggcaccgagcaccaggtcttcctcagcagtggtacatgcgccgatgaagcatccgtcgagcttcatgccgacaacctccgacacgggcttgacgttgtccggggacgggaacagagccacctgcggctcgaggttgtccaggttgatctggaacttctccgcgtactgagcgtcctcgtcagcgcggaagtagagggcgtcgttgttgtggtccgggcgcttggagatgtacgcggcggtgcgctcgtcggcggggaagacaccggcgataccgccgaactcggccgtcatgttactgatagcgaagcgggcatcgcacgacagcgccgagatgttgccaccccactccacgcagcggccgatggccacggtgttgcacttgagctggcccagcgtgtacagcatcacgtccttgccgcccatgcccgtggggggcgtgcccatgaactcgatgagcaccgtctcgggcaccttgatccacgtctcgcccgtcacgaggggcatgacgacgtccgcagcgcccaggccaatagcgaaggcgcccaagccgccggtactgcacgagtgcgagtcggcgcccaccacgatctggccgggctgcgcgcgctggcggtagaactcggtgtgcaggatggtggtgttgggcggctggaagttggtgagctcggcctccttggcgaagtcctcggacgccttgatcatcatctgctggcgcggctggtggttcacgcgcgggtccacggtgtggtccacggccagccagaagcggtcgttgcgccagatgcgcgggcggcccatgtcctggtacgtcttgtccatcgacttccacgtgatctcgcaggccagcgtccactgcgccttgacgcacagcatctggccgggcgcgacctcgggcttggtgaggcccacggcccagtgggtcaggatcttctccggcagcgtcagcggccggcgcgcgggggcgggagtagcagcgggggcggtcgccatcgtctcttcacttctcgtcgtcttgagctcgagcgcgcgagtgcggaaatgaggaggtgaggtgcgctgttccgggggtgagggcagaggaaaggacgagaactggcgaacggcatgatgtgacgggaggcagggattaaggtagacgggttgatttgtatagtgctgacttgtgatgctgagtagagggagatacagtaggatcaggataaagaggaaatgaatgcgcaaacactatcagcccaaacacgttaaacgagcaaacccgtctgagttggtgtggctcacaacttccatgtgacgagccgggttgggatcgtggcgagcagagctggcttcgccccatgcggccacgcggctgcgaaattacactcttggtcagcattaccatcgccgcacgccagctctccgtcttgcaggcattcgcgttgcagccaaactacatgtacactggaagtggcacgatggagcaccgagttccggtgcaccactttcagccgtttgcgcaatttgcgaccttcgcgcaacctgctctcgcgccacattcgcgtcactttacaacagtgaacctctgacgcgccgccgtgacgtcgctgcccccatccccattatccgtcagtcatcgccaagctcaatagcgctccacactcccgctccgccggccacgcgctcaccctgctcctctcctcctccctcccctccatgataaacgccctgcgcagatccgcgctctccgccatgcgcggcagcagcagcagccgcggcaacgccgtcggccgtcgcgccgcctccaccttcggcgtcgtgtttgacgtggacggcgtgctgctacgcggcaaaacgccgatcccgggagcgcgcgaggtgctgctggagctgcaggcgaccgatactccgttcgccatcatgaccaacggcggcggctacccggaagacaagaaggcgcagcagatcgagcagatcctgggtggcggcgtgtccatcccgaacgagcgcatgtgcatgagccacacgcccatgcgcgcgttggccgacaagcacggcgaggagctggtgctggccgtgggcaaggactgcgccgagctgcgggaggtcatggccaactacggcttcaagcacgtcgtcacagtggaccagctgcaccagcacttccccaccatgtacccggacgtgaaggtgcccaggccgctggcgcacaacgggcgcttcaattcgcagcctttcgccgccgtcttcgtgctcattgaccccatttactgggggcgcgagctgcagatcgtcatggacgtcttgtgctcgcccgacggactgctgggccagcgcacggtggagggagatggcaacggcgagcgccagcacatcccgctctactcggcgtgctcggacttccagtacgtgggcgagttccacctgccgcgctacggcgccggagcgttccacgccgtgctggaggacctcttcactcgcacgacgggccacaagctggagaagacgctgttcggcaagccccagcgcacgtcgttcgagttcgctgagacgctcatcgacgcacagcacgaggacgtggagcggatttacatggtgggagacaacccgaagacggacattcgcggcgccaatgaggctggtggcaggtggaagtcggtgctcacgctgacgggcatgcacaacggaccggaaaaccacgaagagcacccggcgtatgaggtcgtggacgacgtggcacaggcgctggccttcatcaaagaggatttcgcgaagctgcaggcgcagaagtcgaagaagtaaataagcgtgagtggcggaagtgaagaatagaaggctgtggttggtgtcgattgggttttatgtcctattttttttatttttttaggcggcaggtggatcttgtatcgcactgatgagcttgtatattgcctgttgtagtgttgatgcttgaatgcccaagtttatcagatcactcacagatttttccactcgcaagttccaacagtgtgaagacaccgtctggtattttctctttgagcagccattaccgtccctgttcggaatgcaatcgctgcgcgctgctcctcgtgctacgaaccttctcagccgctaggatcatgctagctagcgtattgccactaccggtagactgtagattgtttgtcgggacagcgcgtagctgatccacggatcgaacttgaggaggaggttcagactagtctattcaacttatgttatgagattgtctgcactaacccaagcttgccgaagtgcccccccccccccccccccccccgtgaaatcatagcagttttgaagagatctttagacgattcatcgctgaatctgcttggtcttcactcgtttggcgaaagtcgctggcaccctttacgcggattcgacgatcttggtcagacgaactccccaaaaaggttatgtctgtgtagtgatcatactggtgttctaggttgagatctctttgtcacagtatttttttcaagttgcaaattccatgaagtcagctttggggacatattgtggttttcaactattttgccgcccgatttgacgtgttatctcggagtccgacttatataaaatggagctcccacatgatcggttagtccaatttagctatatctgacctgagttagtagcataaggctcaaagggcaagttggacatacctccccacctctcatgacgcattagaactgcaagacattggggacaatagtacactgtatatagccgcttcatagcactatggccatctaaatcacctgtgtgaacatctacggccgctacaacttcatgccacgccgatctgagagggctccagacatgttttcgcggcggtcccttttgccggcgaaaagcggcatttctggcccctgtttcgcaactcgcagcccccagacgcaaatcgggccagatatagtttgcttccctcagcccttcctgctaaatctgagccctccagcaaatcgggcccgatatatcggatcttggaccacccgatttgccaaaacggatgaaagccacaatacgtgtaaccagaacacattatcctcagactcacccttggcccaagtctcgagctcctagaccgaaacattcagtctacggtgtacgatgtcgtatttgtttaattctgtgtcagctcgtgaatatccaggcgatgccaggcctattagactgggtcacgcgggattaacttcacacggttttaagttgtgtgtgaagttcgctgcgtttgacaaatactcttgccggatttgtatgattatgattttataggaaaaggatttccaaaacctgtgttcagcaatcgatgattgtgctcaaaatcgcagcctgacatgccgttgagtgacctggcacagcttcagtctacaagttgctgcctccgagcaagcgcaagtatgagagccaactatccagccgagctagagtatctcaccccaccaagttacgaaaacctggactttaaagacgaattcctgtggactgaataggagtcactaccggagattactccatccccacccaagaaagcgcgccagcactacagccacgcttccaagtcgaaaaagccaaagaaagagaagatccgcacgtacacccggcgccaggttagtaaacaaaatttcctgtttagccgttttattcgagaaagtaaaacatttaccatgttttcgttcactaaagacggagatcagggcgttgaagaacgaaatgaagcggctgaaccagcaaatggactcgtatggcgaacgagggcacgtgatgagagagcgcgcgagattaatccagcagcaacgctcaaacaaagaactgctcgaggcacttcaggtgcagcgcttatcgttagccaccacggggtctatggttcacagttcatcgtacgtccaatgaagaggtgacatattgagttgcaggcgtgcagtaaccttttcttgtgactttctactgtagaacaacaaaatgacagccccgttcgatgcgcttacacgcctcggcacgaatttccgtgaacgacagcgtacgctactggagatgcggcacgatcgcctgcagtttgctcgccagttcatgctccgacaattgcactgcctgggtatggacgagtattgcgaccggaagaagttcaaaacagaccacggcgacctcatgtggctgaactttgaaattgtcccgctgcctgaggcgcagagcatcaaggcgacggtccaggcgctccaacactttgtgcacaacattgagatcaacatttccgatgcgactggcgatgtcacggtccgcgagaacgacaacgcgatgccagacagcgctgtagcccagcatcgccttgtcacgaaaatcgacaacttggaggtcgagtcgaaccacgtggcattcggggaatactatccagcgactccaggtctgcaagaacaagcgttgatgatctgcgatgtcgtggaagaagacaaactgttcccgtaccgtcattcggaacgactgcgccaggacgtgattaccattatttcgctggtatcgcaccagggtgaggacggcaaacccattatcgtgatggctcgctggctgtgccaacgtattctcaagtctgtcattcccgtgcctcagtttgcggtgaatcgcattcgcgataatgccgaaaagggggcccaggccatgctctcatgctgcttcaactcatccaccatgtcgagctcttaacgttgtatagtaaagaagctaaactcgctcgcgttctattgttacttggacaacaccgaccagaaagcatcctgcgagagctgcacgttcgacacggtcctcatgcggcgcttaccctgcttctgcttggccaacagctttttcttacgcgtgctatctccaccaccgacggtcttgccggacttgatgagcacatccttacggtacggagcaatccgctccttggcgaagattttgccaccaagcgcagcctggattgaaatctcgaactgctgtcggtcgataacgcgcttcagtttctgacacagagcgcggccgtccggcgtagctctgctgcggtggcatacgaaggacagcgcgtccagaacttttccgttgatcaacaggtccaccttcacgatgtccgacttctgcggctcgatctcgcggtagttcagcgtcgctatagggaacaagtcacgcagcattagtacgtggtaaggtgaagattatgatgctacaaccattaacttaccgtagccggacgaaatcgtcttgagctcgttgtagaagttggtgacgacctcttgccacggcacatcgatggtcacgataacgcgctcgtcctcaagatagacgaggttagtctgcacaccacgtttttccttcgccagcgccagcactggtcccaggtacgacgatggcgtgatgatcgaggcctccaccatcggctccaagatttcgtagtacttggtcgactcagggaacgcaccaggagtctccactgtgaacttctcacccttcgggtcgatcacagtgtacggtaccataggcgcggtaaccatgacctgcataccctgttcgtccgatagtcgctggtggaaaacttccatgtgcaacagacccaggaaaccgcagcggaatcccataccaagtgcaccactggtttcctgctgagccgtgacgctagcgtcgttcaacgtcagcttctcaatagctactcgcagctcgtcgaagctgcagtcatcagtggggtacatactcgcaaacaccatgctgcgagcctcctggaagcctggaagagccttcagatccgccgacgcagctccttcacggaagaacgtatctccaacctttgcttccgtagtggacttcatgcctgcaatgatgtagccgacctgaccagcatacaaccccttggtcttgtagcgtccgggcagcaacaaacccgtctcctggacgtcgtgcttagtcttctggtgcgcactgtagatcttgtctccagggaaaatcgcgccgtccaccaccttcacgaggcacactgttccgcggtagtcatcgtagtacgagtccaccagcagacacctcaatggtgcattggggtcgcactccacaggcggcggcagtctgtccaccacagccggaagcacgtcctgaatgcccttcccgctcttcgccgacgtcagcagcacctcatccgggtccacgtccagcagcgacgacagactcaaaatgctgtcgtccacctcggcgtggggcatgtcgatcttggtcagcatcggcaccacgtgcagattcctctcctttgcggcgtagtacgtcgcgagcgtctgtgcctggatgccctgcgagcagtccaccagtagcaacaccccttcacaggcagacagcgaccggttcacctcgtagctgaagtccacgtgccccggagtgtccaccaggttgagcatgaaggtctcgccggtcttggggtctcggtgcaccatggacgccgtctgggccttgacggtgatgccgcgctccctctccactttcaagttgtcgaggaactgggcgctctcgcgctccttgcgcgagatattgccgctggactcgagcaggcggtctgcgagcgtctacaggtccaaaatagccgttaattccgtggttttattttcacctcgcacatacagagtcatttatgaaataagaatttgcagcgttttagcttggacaacgcaccgatttgccgtggtcgatatgcgctacgatgctaaagttgcggatgcgttcaggcttgaattcctcgagccgctcggacatgtacggccccacagtagcgggcgtaagcgccgcgtcttccttgacctctctagagaccgtggccagacaacgcgcgcggacggcgggcgcgcgcagcgcgcgttgcagctcccgacgacgtagcgccagcatcccggtcaacgtgttgaaccttgttgtgtggctgtgctgcttacgttgcatccagtgtaacaacacactaaatgcagcacagttaaagcaacacaaagcggctatgttgcacaacatgcaacttgaacctgcttacggtgcactaacggttttacacagacgtgaggatgggcaaattccgacgctccggacctcaattgagcccgtgacactcgaaaatggagcagctcgaggacctcgaggccgacgtcttggcgatgaacccggagctcgggtgcgtgttcgacgaccccgaccatgacgatcacgcgcttctggccacggaggtgctagacttgcccgatttggagctgctgctgccgtcgggcgagctgggcgacgaactgttgacgtcgctgctgccggacgacgaattggacgagaattccgtcgatgcaatgggatcagaggaggagaaggaaggtctaacggtatcaattgatgatccttctacgttgacgtccgaggtcaaggagacggagctcgcagcgcgagaactcaaattcctcgaggcgcagagagactttctgcagtacaaagcggacgcgaaggttgttgatgtggagagtgagaatgagcaacaacgggcgataaagcaggaggttaagaaggagaagagcaggctggaggaggccagagcacaacagaacatgctggtcgacgttatcaagctgcaccaacagagcgctggcgacctgcaccgactgatgatccaggcgtcgccgctgatgcactacgtgagttgcggctgttgaatgttggaatgaaggcgttagtgtattgacgagagttgtgtatgtcttgaatgcagaggatgacgctgatgacaccgatggagtcgtacatccgactaagcaaggatccagccgagcgccgcagcaagctgctcgagatccgggacgagaagctggacgtcgtgcgccagtttgtcacggcgcagactcgcggcattgacccgacgcgtgggttcttctacgttgacactttcgagcgcttcggcaagttttacaccgtggacttcagcgtctctctcgtgaacggcatgaccgtggccgaggtggcggaggtgatacaagaccaattcgtcgtgccgcgcgacggcgtctcgcggttgctcggctgtgtcacgaaccgcacgtactacgacgccatggtcgacactttcctacacgcgcggaccgtggagcgcgtggacctgcccgagcgctcgtgcgacggccgcagtttcctggtgcaggagtccaacgccgtcttcttcttgaagaaattcgccgccggcgaagtcgatgagtccgacggcggcgggcagtcaggcgagcagggcgatctcaccgtcatgatgagcgactttgtagacgtggacgagctgcacccgtaccatacacacagccgagtgcgcaaggacatttccgtgggcatcacgctgcggcgccacgtcgggtccgatggtgccgagggcgtcgtcatgcgccgcttctccttcgtcaaacaccatctcggccggcgggtttccaggtcagaagtggtgaacaccatctcgacgcgggtgctactttgggggcaagcggtgcgactctgcatcgcggagcgcaggcggcagaagcgagacgcccccaagcgcatctggaacacccacacgttcccgcagccgcaccatcggaaggagggcgtgacgccagcgccaccacgacccgacacggcgtgtgccggtgctcatcagctcatgtagtaatttaagttcgtcgtcttggaggggtgcaagttgcagcctgcatgcaacaagggcagcaggttgaacatgttcgtttcggtgagcatccttcgtattcgtgcttgtcaatgaaaaagaagcgttccactcttactcaacttcactcagctcgaatcaaggaagtggtatgtagggactggatggcggcggcaacgcggcctgggaagcacatccgcatcgtcgagcttatagggggggaatgcgcacacgcatgcgtcgaatacaaagtagatagatatacggaggttgtcgggaactgcgggcgcgcgtgccataatatcccgagcgccacgcgccccgctatctcgagataagcctgccgatgtacaagcaatgctgcaagtttaccattctggtggcatggttggtcaagagctcgcccctgccaaactgcacgcgcttgcagccgatctagtcgcgccgcgcatgtgacgcgtctgcagttgcagtgcagactgcagcgcaaccgatattggggaagaatccgcgttgcagccattcgggggcggcacgcgttagcagatcccgccaccgctctcggcgctcgaaccgctcaattggagccggagcgaagatggcttcgggaccgcgggcgcggtgggtggtggcggtgtttgctgtcagtgggtacccgtttccagctcaaatcgcccgctccgagtgctctcgagtcggagcggagctctgagctgaagcctccgggaagcagacccttgtaggcgaagcctattgtcgcgtttccacggggccatacgttggcagcccgaggatacacttgccagcgcaaagtgtacatgacttatcggagattccgagttgaatggcgcgcgtcgagtcagctcggctcggcgggacttcagtcaagcttgtcatgcagtggtgacacaacaagtccaacggtttgactggaggaggacgtgtttctgtttgtggggccacttcaaatcgggtgtatcctctcgctgtgagtaaccaggcgcagactactgcgcccgcccgcggcctccggcgcgtcttgcaggcaagaccttcccatcaagcgcggccgtgggcagcgcaggtatgtatccgtcccatcgaggggcaggatcacgaggattccacagccgtgacacccgaaatactggccacgcccgttcaccaacacacacctcctcgagatggcaaatgatctcctcgttagttagcaacgttacgcagtggtgcaaaccccatctcatcgaccgagcgctgccatttcggtggcggcgccatgttcgactggccgtgacgtcgagccgcgccatgaagatggctccttcgctttgcaacagcggactgaaggtctccaccggaagctgccggtccattctgataagtcgggcgagatccggaagcttcaagatgagcagcgagtgctccaagctgcgtctcaccgctggaaaagcatccgctttaccggaacgagctctcgttgacgttgcagcttgggcgcacaccaccatcgtgatcagtttcctttcgcgtcctccgcctctcgggtgttcgggtgtatcttattgccagatcaagccatgcttcgaggaggacacatcgaatccccgcaattcggtgaggaatcgctcggatacacttcgcccgtgcagagactgccgccgctagtcaagaaacgcaggagcccccgtcgcgtcacactttggggcaaccgccaggctagcaatccccgaccggatctcggccacgccgctcgtgtcgcagcgagagactggcgggtagccatccagtcaccccaaagggctgcacgcgcgcgatgcccgtggcgctcgacctcgccgccggagccgcctaatcccgggctgccagccagtggaaagccgccaaagcgatcctagctcggcctctccgtgcaccagtgcacccatccatccaacacgttggccgaggcccgcgcgggtttctgccggcggcagcgtggcaaggtcgtgtgctacggccgccgccgccagaagcgcgcctcgcggcccgtcggcggattccaacgaggcagcaagcctctcgcccgatcgtcgccggcgcggcgactgcaccgtgacaacgttgatggagcgttgagccgtgatcgcgctagagccgagtggccactgtcgtgacaagttagttgacacctgtgggcttcgcggtgcaacctgcctgtcagacccgatagtatccgtttcgtagctcttcacacgcacagagatgtattgagacaatgcctacataaacagataccccgtcgaacacggtagtacatttttcgcgtcgggggccagctggccatgtcagggtgctaggacgactgcggacggcgagcacgcacgccccacgttgtggacgtgccgctccttatgcgcgaaggcgttggatcttgcctcatcttatcttccaccagcggccggcgtccacgcgcgcttgatgaaacgcccccgaaaggccatttcgtgaacacgcgcgatgcttgtcacgcttgacgacgtcaaggtgacgcgcgcggccatctaccggcggagtcgcaacgcgccgtagttgtgctgccgattgccattgccatgcggccacaagtagcccctggtatcgaacatgtagcggcgaggggcgaatatccgcggccggccggctggagtgcgcggcgggttccacggccacggtcactgcaagtcacctctcgttgcagtggcctcccacttggcctgtccctgcgagcctgctggcgcggcagcaattgcaatgcccggaggagagacgggcggcttggatccgcttgggctcgcctgctctgcttgtcagtcaggcgggcagagaccgtggcgggccatcaagcgaggccctcgctggctggctttggcccgcctcccccattgccatttcagaattcgacgtctagtgaacaagttccgaggacgaacgcaaagccccgaccacttttcagtcaacaacatggtggccacttcctcgacgacgcagcccgcccagacggcgctgggcctcgccaactcgcccgccgcctcgggtctcaacaagtgcaggtacaagaccggcaagtgcaccaacgtgcgctccagcaagcgcaacggccagccgcaccagctgtgcctgtaccaccgcgacaaggccaacaagatccagcgcaagttcgaccgccagaagcgtcaggtggcgcgctccaagaaggcgcgcgacgcgcacggcggccttgagtctccttcctccatctcgatgctcgacatggccgcgctcgccggcctgtcccccatgcccgagcacgccgtgtcccccgccaactcgacgtactcgacgtgctcgtccaccatgtccttctcgtccgtcgcctcggacgacgtgcccatgtacacgcccgactcgatcgactgcagcctcaacgagagcgtgtggaccgacctgcccgtggtcgcggcctcgtacctgggcgagttcaccgacatgccgctgccctcgagctgccaccagagctacttatcctcggacgagatcgacttcctgtgctccgctattctcgagtaaagcgacaagtctgagcgatagagatgaaaggcgtctccctccaagaaatatgagggaggaggctcagaaaagcatcgctcagatggacccggtggcaagtgctgctgtcggcttctcccgagcgagcgcggaatggcacattaggataattagagcattgtggtagtagcgtggtagactaagtgagtgcgtgtgtataaagtcaatggacaagtaagtatctatcaacaactggttttgcaaacaaaaaatcttcaaccagacgtaatgtgtaccaaaggctcagcgtggtggcgcttcaagtgcactcagctagtgtcgccaagtgagggggttcacgagtatgaagtcgtggggtctgtgcattataaaaactatgatcgatagataggcagcggatgaaggaaggtcttccttcccgatttggaatgcaagcgcgacggacatagcacaattgggaccgcgccactagactgtggaaacgtcgcggaggtttcgagacaattgggggtggcagcgaaagctaggtgctttattgctgcaaggaaggcgtcttgtgtgcgtacgtgggtgtccgagtgcaagtgcaagtgtcagctctgctcacaaaagggtggagcttccgggtgtgcagcagccgcgacggtgacgccaatgagccacggcacccgccgtctttatcctccgtcgacccaccacaaggaagaaaccacaggctccgtccgtcgctcgccatcaccaggaccggaccaaagcgctcagtgggggccaggcactgtagatgccgttgcaccggtccacgccgtctccggcgcctcggcacttgaccccaacgccgccgcccgggacgaccaatgaggccatggccgaggccaccgcagcggcgtcgatcctgagcgccaaccagttcaagctgctgtacctcatcagcctctacgccgtggcgtccaactcgacccgacagaacgagcgctggatccgacacgtcccgctgctggtgctcatgttcgagggcatcctgtgcgacgccttcgactttgactacgcgccggcgtccatgcgcttgtccttcaagggcaagacgctgcgacgctggatcaacttctctcgggagggcaaggcagcgatcgacgatctctgggccctgcggctcatcaacggactcaaactctcaagcgacgacttccagcccattacagcgtaccaggtctccattaagggtcaattggcgttgcggctgctgcctcggtacttccaggagaccgtggacgccttcctgtatccaccggcgccgctggaacggcggctgcttgttgtacggtatgatggtcagcattttgtcctgcggtcagggggctacagcaagcccagcagtatcacggagagcgatgatgtgtcgtatgtatcgagtccgttcctgccgcgatgtctgcgctcgcgatccggcgggtattacaaagtccaggagcgcagcaacgccgatagagcccaagagtgcgcgttaggggcgactagcatcaccaagaagacgtcggaggccgtcacgttgggagacgtgtacgcgctcatcggcgagtgggtgcccttcggcaccaaccagatcgtggcgttaaacgagcgcatgggcgtgctcgaccgatgtcagggtggaatcctcaccagttgtgtagatagcaaccccaccgacgcgcagttccgagtgcccgtgggtcaaactcaagtgcgagtgctggactacgacttcgtgcgcttcacgaactttgaggctgaaagtcacttcccagagacgcccgggatcgtacaggtcgagaacttcgggatgcacctcaacagcgacggctcgctcatctacggcatcaaagtggaggcggtcatggaccggttgggcgacgacgtggctatcgaccacctgtctcgactgctggtagacgtacaccaggactcctccatgctcgtcaacgacctgctttcaaggtaccaactcagtctgctggagatgctctatctgggggactccttccagcggaacaagtacaattgcatcctcagcaagcagattcatccgaaacttccagctcaagcgtatgtaagtgacccaaggtatgccaacgagctggctcaagtgctcggggatatccatacaagccacgatttaacccctgacgatgtcctggtagtggggaaggctgggtgcctattctccgggcccaatgtgttccgatacgagcatgttttcacggcgtatgtgggtttggtatgtcgagacatcttcatcaagaacttcttcgcgcgaactttcgtgctggatgcgacgctgaaggaaatccgccagctaatccacaaggtacatcgagaacccgcgacggtcctccaagtgcgtgagaaactctctgcagtatcgaaagacacgattctgctggccgagacgctcgagtatctcttagactcgctggaaaacgtcgagctctcgcctgccggctcctggggcgaccgagatgatttagacgagagcggggacgactcagtcgacagcgtcaggaggaggacattcggaggacccgagtcggacgtggactcacggttgttccaagtgctggcactgccacagctgaaggcgcagaccatcatgcggtgccacgactccatcaagttaatggagaacacaatgctacagctcgagcagctacagatgatcgccgagtccaccgcaacgaatctgcttgaagtggcgtgctcgcgtgtgaatcttaatactcaagctctgatgaaggccatggctatgcagacgcgcatgtgcatcacgttgaacgccatgcaatactttgtcggtggaatgtttgtgtttgacgtgattgaccgactgactggaggcacgtggaatgggcatgtccccaagtgggcgatggactccatcatagatccgatactgcaccacccgctgctctggtgggcgatcaacctgctcatacttgcggctttcgtgacgggactcgcactactatcagcgtggactgtgcggtgctcgctcgggtggtgtgaggcgtctttcgaggtgaatcgcaggatcgcgctcgacaaactcgacaccttcctggcagcgcggaacgtacagagtagtttcgctctacgaaaggtggctacagcaccagggaggaaggccaaccggtttcggatgataaagtggacggagaccgattctaccctctggggtggcgttctacccgaagttgagctcacttttgacgaccgacacggatttctgttgtttgtactgctgcgcttcgacggcaagcgctacccgcacatgctagaggacgagtgctaccaaaagttcctggagatcttcacacgcgcggagatttttcgagaagacccgctccggtggagagaggagtagtcgacagtcggacaaaactacgggctccgttggagtgcgaacccctggcaaggctttcgtcacaatgcctacaacatcgctacgagtgattgcggcagtgttgatagcgtgcaagaactatggccgcaggagccaggctcacactgaaagcgaaccgcaacaggaccctatcgtttggaaagaacgaaggtagcgcacgacgtatagagagttgctaccatactatttaagctgcgatgtcgagacctgtcgaggatttcgatcaattgcgcggcaaaatacaacgcccacgaggtgaaccccagtctacatattttgcctccacctcaccaatatcttactggaccagtaacttgatttcaaaatgatgatgctcagttccctttgcgtgaaaggttttggtgggaacaaggccgaagatgatgctcgaaaatggccgataacaccgcggcgggcgcgggcatttgtcactgcaaaagttgtaaccttgaccgcaagtagaaccacgatggaaagccgctcgaccacgctgcaacctcaggcaccccctgaatcgcaatgcagtgacactgttggatcttcggatgagaccatgccatcggagcccctagccgatcctacagtactgcgctgtcgtccaaaagagcccgacggacggcgaagatgcgtgagtgcagcttcaagccgaagaaggccaagatccggacgtgcgcccggcgcaaggtacacatgaattctgggatcggcagtgttcgtccttgtacagaagcttcaaagtgccatgctaacgtttttatgatgttactgggcaggcggagatcgaggagctgacagcagagatccaatgtctgaagcggcaaatggccggccatgaccatcaagcagaggtgcagagaaacaaggaggcgttgatgcaacgcgagctctcaaaccaagcgcttcgtgccgcccttcgagctcagcgtctttcgtttgccagtgccgtctcgatgctctctcaattctgcgtacgacatagcactgtctcggatatgtgaggtctctactctaactttcttgctctctttgtccagcgcgaggaagtgaccggtccattcgatctgcccacacgacttggcaggaacccgtatgagcgtgaggttgcgctgctgaggatgaagcgggaccgactcgcttgttcatgcttcaacgccagcagttcctctctacggcggacttctgcgaccggaaacggtcagtcgctaccaatggggacatggtgtcgatgcactttgagattaccccgttgcacgaagctcgcagcgtcaaggccatcttcgacgcgctgcagaccttcgtgtacaacatcgagatcagcatctccgaggccgtcggggacatcacagtgcgtgaaaatgacgacgccaagcccgacagccccgtggcgcagcaccggcttcacaccctgatccaaaacgtggtgcagatcgaagccaacaatgtcgcgtttgcagcgtacgacccggcgggtcaaggcggacgcgagctggggttgtcagtttgtgacgcagtggatgaagacgatttgtttccgtatcgactgctggaacgcatgcgtcaagacatgacgatgatcatccagcttgagtcgagcgaggacgagagcgggatgccgtttgtcgcactgactcggtggtggtgcctacgcatccggaaatcgggcatttatgtgccaccgttcgcggtggagcgtattatatgaagcgtagacaaggttgccgaagctatgctgtcgacggcgacgcaggctaccgccgtgagctgctgaagtaccttcgctagaggttcgagatcttgcggttaacagtgcaataacaaccggttttctttgcgctacaactgtaaagccccttccacaatacattattctcgcgcgactgcagcgttcccagcgcactcatcgataagttaatgcatactgttgatgccggggtgagacagccaaaacaaacgttaatagctggccgtcaacaaacgaagcttgtcgaccttcacacaagcgctgcgtcggcaacaacacacgctctgcggtgtcggaagcctattctcgcttcaacgacggccctagcgctgctggaaacccctgctggaagcccctttttgcagcgatctccacgcccaactagcgaaaacttcaatggtaatccgtgcgtcatcatgccgatgatgtcggcacgcccatctccttcatcgcccaatcagcgtgcagctgcccgtgtcgcgacggacgagagctcagtcagcaaacagaagacaaatgagcaggaggccgcagaaccccaagtacgacatcgccagcctgcttggcgtcgatagcgaccgcgctccgagcgctgagggtcagcaactaccaggactcgcatttgttctgcagcaggggggctgcactccaacattcccagctgaaaacgcacagtcttcaccccagtgccatccgaatggaatggaggtggagctgccgccaaagcagacaagcgccacaaagcgacgagcgtccgagtgcgaggacgataataacgcagcaacaacagcagaagcagcggcgccaacaagcaaaaagtgtcgaggcaaggggcgcaaacccacgtacctcgtccgaaaggtgggtgagacgcatttgagtggttagtacgtggccaacgtattgactggttgtgtgctatgttatgctgtgctgtgttgttgtaggaagaaaagtgcgagctgctggagcacatcaaggagctggagagccaggtgtcgttcctcaaaaaccgcaccaacattgtggcctggcaggagaaggaccggcagcagatcgagacggagatcaacaacaacgtgctgcgtaactcggtcaagcagcaccagctgcaggtgctgtcggcgcagtcggcacgcattccgtcaacaatcgctgcccgctcgacgcgtacattcacctgggccgcgaatgggtccagcgaacggagacgctctgtcgcttccgcgcgcagcagtgtcgagacgccgtggagctggtggagaggcgcacgcagttcatgacggaggcccgcgagtacactgagaacgcgcagttcgtggacgaggcgggggatttttgctccatccgctttgacatctcgccgctcgaggggctgaagacggtggacggggccttcgacttcatccagttccacatcaagcacatggacaccaagcccatgaactccaagtacacgtgcacgagcgagctcggccccgacaacagcatcatgcaccgccggctgatcatctcggaggtcgaaactgtggcgaccgagaccaacttcgtcatgttctccgaaaagtggcccggtgcaagtcaccaccaggacaggtgcggagacgcagcagcggacaaaggcgtcatggttatgaactacgtggacgaggacgacctgtacccgtatcgccccgacaactgcgtgcgtctggacatcagcggggtcatggcactgaaattgtaccgcaaggttgttaagacccccaagggggaggacaaggaggtgcccgccgtcgtgctcacgctgcagaacagggatcccgaaaaataaatacgcccggaaatatatttgtattttcggaatcaatattttattgtaggtatacctccttggtttatccggtatttattccagcttagatcaaaacttctagattttatttctgcggttgaatatatccttcatgattgagaagttttttcccctaattttcattgtgttaacgccatcaaattttccctttatgctaaaatgatgttgttcagcaaccttaacacggatgtggcgaccgtgggcagtgtttgtaagaacccatgaaggtaacacgattgcagcaatttactgaataatttactgcgtcagcacggggtcttcagattatttatttcttctctccttggtatacaaacaaatacgtatttcgttaacttgagaaaatagatatatatcgtaatttcggcatgcctgctgcagaagctgcggcgcaccgagttgcccgtgccgactcacgtgcttcagatgatgcgcgatcggatcaacgacccgggcaacgccatcctgcgggcggtcaaggacgcgcggacgcccgtggagctcgagcccaaggacatcaaggtgctcattgtctagcgggaggggagcgttgaagctgcgcaatcgagaattaatggggagagggcgatggatgagctctggtgagctggtgctggtggttgcagtcctttcgcccccaagcagcacgaccgtcatccgcgccgattgtgcgtccacaaagccagtgctctggcatcatcatggcagtgcgaacgcaaccgcggggcatcaccttgatgtgaagatggctgcgagagcgatggccttgaccgcaggaagcgcttcggtggtgtacactgcaacacgcggatgggcgtcaggatctactatcatattggacgggcccttttataatccatatgtagccatgtatttatctttcaatcatagttgttaaaacggatttcaagtactcagatcagccaatgacatttcgtttcctgtgttatgcgatacagactatttgattaacgagggggccgcgaatctgcttcaagtggggcgtgaccgtcatcaacttgtagcatgatgctctcgaaccctttttctacgaataccccgtagtatcgcatattgatccttcattgattttctatcgcttttgacctctaataaccgatgcgcgaaaaacgaggcatcacctgttgatgccaacgatcgaacaagctcccacctctaaagtctccatcgtaaagcatagcggcggtacctcgccgaatcagcctctatcgcccatagctcgacttttcaaattgctcggcgacagacagacccccacacagcttcaacacttgcgatggacccacccactggctcggcgtcgccgacactgccgtccgcgcgctcgctgctgtatcggtccccggacgtgtcggccgactgcagtcgcccgctgcctcgattgaacccgctgccgctgcggtcgcccacgccggcggacgtcagcgacaagacgctgctggtgttcctgcacccggaccgggcgacggccgcctccgggctgcaggcgaggagatcgatctcgccccgctccgtcacagcccctcagcagcaggaagaccctgcagcgaagacgataagccgcaagaggaattcgcgcgactttgacgaccaccgaaccagctccgacgatggaaccggaggcgagaccccgcgcggacgcaagcgcagcactcccggatgcaagggcaggaaacccacgtacctcgttcggaaggtaatagtgctacattcattcattagctattgtggtggtggaaatgtgaaagtgatgagagtggcgatgatgttgttgtaggaggagaagggcgagctggaggagcagatcaagaagctcgaggcgcaactcgagtacctgaaacacacggcttcgaccgagtgtttcgccagagcggttgtaagacggacagaccacaagtttttcgagcaggagatgcacaaccatcttctgcgagaagccgtccgcaaccagcactttcagctcttcagcgcgcagtcggcactttcggagctcacggtgagaaatttcactcagacgagatatggtgatgttgtgctgatgtcatcgtgtcccaacttttgcagtactcaatccagcagaaccagtgtcccatcaacaccttcatccacttggggtgcgatatccagcaacgacacaaggtcttggagaacatgaatgcgcaaaagttacgggacgccaagcagctcatggataagcgcatgcagttcttgagagacccagccgaacagcgtcgggagaccgctcagttcccgacggactcaggcgccttgtgctcggtgatttttgacgtgacgccactcgatggaaacacggaaattgaagacgtcgttcgcgcctacggtgccgcctcgcgctatgtaaaaagcatgggcatgatggtgccaccattcacaggggacgatgcgggtgtggtccatggacgtctgcaaatcgacacctcgccggagatgcccacggagtcgagctttgtggtcttttcggagctgcagaagccgacatttgctgaggacagagatcacagcgacaagtgcgttgacccggttggcatgctcgtgctggactcggtggatgaagatgaactgcacccttatcgtccaagtgagttcttacgggaggatgtcaacgcagttatcacgatcacaaggggctctcggcgtcaaaacggatacaaagacaacgaccccgacaagcgcgtgccgtgcctcattttgacgcgctgggtgttgctgacgctacgtccggatcagaaggggaatgcaccctcaggtgccatggacttcctgctccaaacctgcattaacatgggcaacgagatgcttcacgccatccaggaagctgcgacttgtgcgaaacttactaaagctcgcggagttcgccaaccctggagactgggacgtacatgcacatcaacctctagcggcactgcggatgtccccagctaatggaggacggtaccggtagtaatagtatagcaagatagcacgacatgacctcagacttcggcctaaagaaatgttagtactgtagcgcgagttctgggctgtatggacttgtgttatcgttgagctctctctctctcaaccaaaactcgatcgtccagagttttttcttgcattaaacgtggttaatatcttcggctaattggcggaagaaggctcccgaaattaggtggcgggggcagcatcgccgccattgctggaggtgccatgcttgttggcaagtctccagacggcacgattgggtcccgaggggtcaaagcgtagcgcacattgttcagcatcgcctcgcccacctgctcaatcccattccgaatacgttgtgtagcttcgaacggcagatggatcgatgacttgcggatacgcagcagcgaccagcgcgtcagaatcaccacccgctccatctcgattgggccagcgtatcctacgggtcgagacttcggtctcgtacaggtcgataccagcatgagcaccgtcacatcttgtcggatcctccgccctggaatgtacgggtacagctcgtcctcgttcacgaagtcaattgcaagtacgccaagctcgtcaccatggccggtggcccccagatcttcccactcgttcggcaactcaacccctagcgctgcaggaccatttcgttcatggtactcactaaacatggcgttatttgtctccatctccgccacgttggcaacattcgtaaccagcctctgctgcgagacagaagggtcccagtggtcgtcgttttccctgatcgtgatatctcccagcagttctgacaaactgatctccaaattgtacgaaaagttcagcaacacatcaaaaactgtccgcgccgagcggatcccggcaaacggcgtaacatcgaagcccatgtagcaaaaatctccgtgcgcgttctcaaacttctggttgtcggagaagggggtcgacgggtccatgaatctccgtcttgccactagaaactgcagcgcgtcgtgcagtttcttcttcttcatcgatagcagcgttgcgtggcgctccacggggtctttccccagctggatgaacgtctcgaacggactgtgctcttgtacgcgcatgtactgcgcgatcatggactgcgtgttggcaaacgccagtctctgggagtgaataacttggcggatccccctgttctcctcctcccggcggcgcatcctctctctatcctcgagcgcgtcgttttgccgccggtactgttgcatttccttctgcaacttctcgtactccttggagagcacggccagctcctctttgcgcatgtagtaggtgcgtttccgctgcttcttgggcttcggctccgtatctttctcgtcagttttggcagctttttgcctctttgtctttgctttaactttaggtggagctgcttcctcctcttcttcttccgcggcgtcgctcttgcccgcgggggacgacgttagcgacgaggccgcagttgccgtcgtcgtcaggtcgtccttccagggcgccgaggcgcgcggaggcgccaccgactgcatgagcgatagcagcgcgtgtgcggaggctggtgaagtgggcgcggggggctcgcggtccgagaagggcggcgcgcggagcatgtcgcgagggctgaaggcggtcaatcgtgcaatgtttctgggaaaggctggacctggctattggaacggttaggtggtgtacggtttagtagcaaagaaaacgatgggtaattgactatagtgctcgatattaataactgaaagatggagagagccgaaagaggctctataactgtgcagaattgattacgcccgattactttgagaatggatttctaaaccggaccaaactcttgttgccgtctgactgcaccgcagaaggtatgttgatgtaagttgtagttgcgctgagcttgacctggacatttgcgtcacgtgagttattgctcgtgtatctgtatctgactgttggtgagggtgatcttgcaatgagaatggacaactgcagtttgcgtggtacacttcaagcgctggtgatcagtgtgaaaacctgaacttctctgagtcatgcgtgattgattgactcttatgcagcgagcaccagcaagtcgcagagactgatgttggtactcatctatgacggcacctccaccttttttactgcgcatattgaccttaccacacaatttacaactcaaaacatggagcgatattttatttgaatttttatctacagcaatacgcctgtgcagctatgtagctacctacacattccgtctcattaacggagttaatctcccattcaccgagtgtcgaatggcggtgaacatggcttggccgacctgctccatgccgtcgcggatgtgcgcggcaatgtcgtcgtccagtgggaacggaggcttccgaagtcgcaggcaggtccaccgaagcgccaccacaatgtcgtcctgtccgtcgctgctgccacttaccgcagacccgcattcactggcggtaccactgggagaaccgacaggataattggtaggggtggcgctgggccgacgcggatacctcgctaccatcacgtggaaagtgatatcttgcctcacacgttcattcacatggtacgggtataacgcatcgtcatgaacgtagttgcacactgcaatgcccacttcatcgctgacagctctgtccgtgcgaggccccgagccgtcgccccagtactgcgtgaaggtcacgttgttcgtgtcgaccttgacgtttggagtgatcgtcgtcacaaggcgatgctgggccactgaagtatcccagtcttcgtcgtcattctcgcggatcgtgatgtcgccgataaggtccgagatgctgatctccaaattgtacgaaaacttgagcacgccctcgaacgcctgcctgacactttgcgccttgggcagcggcttgatatcaaagcgcgctaagcacacgtccccattgtccgactggaaacgttggaggtcggtaaagtccgtgtccatggccatgtatcgcgagcgctcagctagaaagtagaccgcctcctgcagtcgctgctgcttcatcgccaacagcgtgctgtatcgatctcgtggatctgtgcccagtcgaatgatcggctcgtagcgactgtggtccccagctcgctacaaagtgcatagatctcgttagtgtcattatcaatacacgccccacccttggggtacaatagccagcccagttaccagaaactcggagattatggactgtgtgttggcgaagattatccgctggcctcggatggagtcgcgcagctgctgattccgcctcaattgcatctcaacgtcgtcctgtccgtcctggccgcgcccgcgtcgcttgaggtgctgcaactggatggtcagaccctgcagcttcttctccagcatctccttctcctcctacagtagagtacccacttcatcaggcccaacccccacctcgctcaatgcaactgagactgcaaaactgtaccttgcgtcggtagtacgtccgggcccgcagcgccgggttcagttctttgtggcgtctgcccctcgctggcttggacgactgtgcgtgtgcggcgcccgagagctgcagcggcggcgcggaccacaccgagttgctgctgctgggcagcgtcgactgcaggttggggatgttgggcggcgcctggaacggagaggggccctgcatgctgcccgcgaagcaggcaggggaagccgcgcaagctaaggttaagttgaggtctcagctcgagtgagcttcgcttcggtcacaccaggcgtcaacactgatagggataggggcgcacttcagaaaaagctgaagttgttgtgctggacgagcgcaatggttcctggacaccaaggcaaaggaacttgttgtctcttgatgccactgtatttttactgccaatatttgatggagttcgggtcggaaggcagcctctagatattgcaatgtaattcatcccattgaggtgctgattgataacgcgatataaatctgcaaaaagcaccggtacgaaatcaaattgtaagcttacagacgtttgatctccatgacttgcaccacccttttgtacgccttatattgctgcttgtggagtgacctggccattgaccgagtggtggatggccgtgaacatgtcctgcccgacttgctccatgccgtcgcggatgtgtgaggctgtgacatcgtccagcgggaaagcgggttttcgagcgcgcaggcacgtccaccgagttgccaccaccatgttctcttctgtattgccactcacagtggcgggggaaccgactgtgtcggtgtcgtcgctgaatgcaccaagtaagtttcgcggatacttcgctatgacaacgaagaacgtgatatcttggcgcactcgctctgcttcatggtacgggtagagcttgtcctcgtcgacgtaattgcagactgcgatgcccacttcgtcgcccactgctctgtcgggttgcggccccgagccatctccccagtactgcgtaaaggtgacgttgtttgtgtccacctgcacgccatggttgaccgtcgtaaccagtcgatgctgcgccacggagctatcccagtcttcttggtcgttctcacggatcgtaatgtcaccaaccagatcagaaatgctgatctccaggttgtacgagaacttgagcaccccttcaaaggcttgcatcacatctcgagctgcaggtagcggcttgatatcaaaccgcaccaagcagacgtccccgttgtctgactggaagcgctggaggtccgtgtactccgtgtccattttcatgtgccgagaacgctccgaaaggaagtaaactgcttcttgaagacgctgctgtttcatggccaaaagggtctcgtatctttctcgcgggtctgtccccagtcgaataacgggctcatacagactatggtccttagctctctaaattcacatcacagcactcaatgtcagtcgatcaaaagacaaaaaaagcataccagggctacgacagtaccagaaactccgagatgtaggactgcgtgttggcgaaaatgatgcgttggccttggatcgagtcgcgcagctcttggttccgcttcatcttgactttgagggcgtctcggcgtatttcgaccacatcacgacgtgccagtcgctgcagctgcagattcaaagccagcaccttccgctccaggtcctccttctcctcctgtaataaaataaaaatacgttagccacaataaaatattattttaataataattggagaagctcgttaaaacgagcttctccaattttgagttgtgcttaccttgcgtcgatagtacgtccgtgtctgtagcggggtgctgggctccttcttcctcggtttcgaggcctttttggtcttcgatgcaccggaaacttgctctgacggagcagcccaaggccggttatcgctgtgagggggtgacgacccacggatcggccttgcggacgctgtagcacgcgacgaggagacttgcatgcggcagatggagcgggtctcgctggttaatggagacctcgggcggactgatgagtacatgacggtacttcaagtacctcaagtacctcctgacaagaatttcaaggaacagtacttcaagtacctcctgacaagtatttcaaggaacagaaacaagtctaatgatatacaaaaaccttccaacaagaataatcgagttgcctcaaaaactacaacatgtcctacttacagttaactgccgtctgccccagcgtgtcgagctgccgccaccattgcggcacatatgtactcgatcccgttctgaatacgcgtcactgcatactcaggtacactaatgctagagtgtcggatacgaagacaccaccacctcgcgaacacaataaccggagagccatctttccgggtttgccagttcaccatagtgatgaccgtgacgtcttgcctcacgcgtgctgcactgtacgggaacgcttcgtcctcgtcaacggcgtcgctgatggagaagccgacctctcgttggcctggccccgccgggatgtacgcgttgaaggccacgttgttggtgtccatctgcaccacgtccccgatggaggtgacgagacggtgctgcgccacggagctgctccgttgagggtcgtcgttctcgcggatggtgatgtcgcccagcacttcggacatgcagatctcgatgttgtacacgaagtactcaagcgcgtcgacgatggccttgacgctggccgcgcccggcaacgggatcacttcgaagcgctccgagcacaagtccccgttcaaggcctggaacttcttcttgtcgcagaactcggtactggtgtccatgaaccgctgacgctcgcgcatgaagtcgtaggcgcgttgaatccgctcgcgcttcattcgcagcagctccatgtgacgggcgtacgggtctttcggtaggtgcgtgagcgtatcgaacggccccgtgtgcttctcccgctgtcaatcgagtcaaataaactttagttttcaatttgcttcatgggctttgtccgccacaacttaccaaaacttgcgaaaccagcgacagcgagcttgcaaaggccaaacgttgggtgtggaggacctcacgcagagctcggttggactctaggcgttggcgcagctcctctcgccccctcagcacttcgttgcgctttgcatagagctcgatctcggctttcagacgcgccatctcgcccatcaagtcctcgatctcagcctggaattaagagcacacagcgtcaaacacccacgatttgagctgaagtgcccatgacctgaccgcacttttcgtctgcagtacgtgcggatcttttccttcttctgcggttgcctctggttcttctcggacgcacgcggggccgatactttcttaggcttcttcgtacggggtggcgtagtggcgcgagtcaccgacagaagacgcgccgggggcgttccatcgcctcgagcaggcgcacccttcacacagttctctcgacttggcattcgttccccaatgcctgcagcttggtgtgctactcgattgcggcaagcaaagcagaatccccggtgtcgagcatcatcaaccgtgcaccgggaagtacctccaacatggctacacagcacttgactcgctttcaaagtgacgagcaccgaggaaacataatcattgaagttggtcctgatgcggtagcgacaagcacagtctccgcaaagattaacgttgcagtgcaacttgcaccactaagctgcaccaccttccagtaaggtgcttgtcgttgaatggcttctatagtatacggttgagtgaagcggaagggtagtcggcacgctctgcggccgcgagcatggaggcggagacgctgtcgagtccgttggaaatccgctgcgcgatcgcccttggcacgtggatgtgggatttccgtaaccttaacgaccaccatcgcgagaacacgataagcggcctgccctccttatcctgttgcctggacaccataatgatcaccgtgacgtcctggcggacgcgggtctcgggtttgtacgggtacagctcgtcctcatcgatcacgtcgttgatagagaagccgacctcctcttcgccagaccccggcggtcggtactccgcgaacgccgcgttgtttgtatccatctgcaccatgttagcgactgtggtcacgaagcgatgttgggccacggggcacgtggtggacagccgcggctcgtcgttctcgcgaatggtgatgtctccgtccacctccgacatgctgatctccatgttggacacgaacgcttccacggcatcgaacacgcgcttgacactgcgcgcttggggtagcggcacgatctcgaatcgctcggagcaaaagtccccgttggtggctgtgaacttcttctgctcggtgaagtccagcgtcacatccatgaatttgagcatttccctcataaactcgtaggcgcacgataagcgctgcttcctcatctccagcaactctgcttctcgcttaaccgggtctttacttaaccgggttggcgtatcgaaagggccggtgctcttctcgcgctttaaaagcggaaaatgaaaacacaatccaaggttaggagagtgttaaattagtgcgaaaaaaattgcggttaccaccactcaggaacgtacgaaatggtgtgcaacaattgacgccgcaccggcaaatgctcgacgttgggcgtgcagcacgtcgcgcaacaccttattggtgtgctgccgcagtctcagcgcctcacgcggccgcagaatatcggcgcgctcctcgaggtcctttatcctggcctccaactgcttcttttcctcctcgagctggtccatttcatgctgcagcaagttttgcaacaacaagtcggttagatgacacttgaacgctttgagaattacccgttggacacttgccttgcgtcggtagtaggtggggactttcttgcgtttgtgttggccattactgcgcttgcggcttgttgctgcctccccactcttctggcgcttatgaggggatgcctcgtcgctggaggaggacgcggggctcgcggggcgtgtcgtctcagccattgcgtaccgtgtcgaaggtactgtacagaatgtactctcacttccgacacctgtcaaatctagtatccttaacaatttgatatcatctttagcaggtttcacaataaatcgacgccaagcattgagcggctctcaatcaacggcaagccgccgccgtcgcgcacgaagcttgcgaggcttacgaagattctgagtgcagcacaagggacgcagaaacgtgtctcttgggtgcggaggtatagggggatgggggtgctggcaggtaggcatcgtcttcgccgcaagaacggatagaagggctttaggtagtagacagaggagcagttagcccgcgccgtgggcccctcggcctagcggcaagtagtggggtgaagtgagaacataggagtagaaacgacagaggaagaactggtagatggagccgtgagaaagcgctggcgtagatagtaaaccagcgtctatagcttcctactagtgctgcagcgcagatagcattcagcgagtgtggatgagctcaaccacaacagctcactcacaacttcgtctcatagttaatttatcgcttgcgcttacattttattggggtgctatggccgctggggctcacaccgatgagccggtgatcaacgaacggagcggcgacgttggtcgccacgccaacttggtgctggtgcgctcatacattagagaacctaaagttctctattgtaatacctgctaactaattatgtgtgcatgaaaaatacacaccagctggggcagtactacctgtcggtcaacgtgagcagcatctaagcgtgatgtggcccacacatttggagtttcacgactatcaccctgttttgactctggcgcctgtgcttgcaccatccgctcaccctgttctgatatgaaaacccagagattgcacgtgattgcgaccagagagcaccgtgttctgacacacggtgcgtaatgcgcatatacacattgtgtgacctggaattaatctgcgcttcaaaaaagaagaaaagcaagcgaactttgtccgaatcaatctataaaggtcccttgccatataaaaatcgtaaactggggtagtcatatctactagaaacgagaggtcattttatttaacaggtggttaagtacgctcagggcaacgttttgaaacgttttctgtttacctgcgcgcccatctcgcggtctcgtaaccctctctctgcccttatccgaggcgatatgggtgcaaggtgttgccacttccgaaagcaccgcccgtgaacaatggcgcccgacaagctcatgcagcccttgccgtcgctcctccggccgcctcagtcgtgcatgtctcgcccaagagtgcaagtggcgccggctccgcccgcccgcgaggtcgaggccaggcacctcgcctccagagccaacgaggctccgcagcaacaacaagaagaagactttttcctcagcgggttaagcaaaacgcaacgcaaaccagcgccatccgccacggttagtccagtgctaaccatttttgcattcgcaaaaaattccacgtattcacttaactgttttggttttaccttaacctgcagcacgagttgcggcaactccgcgccgacgccgcggcaatggagacgcaactggcttcgctgtgtgcgaaatggcaagagcacctgcccgacccctccgttagagagtcggcctgtgttgccgccaaggccaagtgggtgtcctcccaagccgaaatggtgaaccgttcgctcaaggaccaagtgttgcagcagcaactgtacctcgcgtcgttgcaacacctcataacccagtcgccgttcctggccccgtcaagaagcaaggagctcttcgaggggatgcactcgttctcggcgctccccaattctctaaccacgacccaacgcaccgaccacctcattgcccagtgcgaaatgggggtgcgcctcgtgcccgcgctgatggggaggttcgcgcggcaacatttgccaaatgcaacattctctaaccccttctcccacacgagcgtcatggcggacggcaacttcacctacgtgtccaacatcctgctctgccgcatcccgcaccgatccatggaatttgccgtgggggccgcgatgcactacttccagaacctctcaacggagctaaacagccacttgggggtgcactgcgacctcgaggtgttgcaggatttgggccacggtcgagcttacacccagatgcgataccgcaacggacccagtttttcctccagcagcaacacgacgctcgccgcgcgcgtcacgcccgactcggccgtggtggtggcggatttcgttgatgaggacgtgtgctaccccatcgaccggacgtccgaaaaccgcgcggggctggactcgtgtctctcgtacgtgctaaaatgttgcggggtcgttgaagttgccgacttcgaagtgctggatgttgccttaatctttgcgatctgacggcgattttttttaatttttggtgcaggctcctcatgacgccggagagagacccgatgaatggtcaggagcacgtcctcgtgcagagattatctgtgaaccggtacaacctcccgcccacttcgtccaggctgcacgacgagatccggtcctcgctgccctggttcaacggagacctgttaatggaggtcatttgtcgccaactcgagcaaaacggacaaccgagagccctttaaccgtagaaagcgacgacgggggatccactgatatatatatatacaaggatagaagaggttgagcgaggtagagcgagatagattttttttatggaaacgtacgtgtgtgtgtgtgtggcaaacgaagcctcgtgcgggggggttaacgaaggaattgacaacatgaaacaacaaaccaaagtcgttaaattattctctatctgctgtgatggttgatactacattctctctttcttttcaacatttaccggactacatcgagtgcatcagattacttacttatctttcactatgcacttggcgcaatggggggagtgcttgaagctggttcgacctcagccgactcttgtttcactggactggtcttctgcttcttgatgcttcgatcctcgtcctcctccgtgtcttcatcgtctaccactttcttgtcctccgcttcagaccgaacgctttcacttccagcgacggacgagtggtcgtcgttgttgctcatgttcatataggcgtcactgagcatggccatgtggaagtcgccgttgaaatacgacagcagcttgttgagctcacggtggatcaccggcgagttgggcggcaggttgtaccgatgcacgcgcagtcggcgcatcagcacgatcggctcctgcgtctccgggtccttcacgcgcgcgatggtcaggatcatgcagatgtcgatgcggagccccgactttggcgtcggaggcaccaacggcacaccatcgctgcccacttgcacctcttgcgtctctttccgatccgagccttcatcgtcgtcctcgtccacgaagtccgtcacgagcacagccaagtcatcgctcacgagtctcccactccacgcgcggttcgtgtgggcgccccgcatctctccatcctgccgctccacgcgcgcgtaatatgtcgacggccccatctcaacctcgtgctacgtggacgtaagggaaccccgttagtacatccgctaacatgcagaaacaacaccacacagggggcatgtttggacacaacagtaccgtcggtaccttgacttcgagcagcacgccaagacggcgttccagctcgatcgaggtattcttgaggttgtccacgatggtctggtagatacgcggtatcgaggcgctggccggcactttgcagacgaagacgttggacacgagcgtgccgcagacgctgcccgctttgttcctgtcgttctccactcgagagttcaatggcggggatatcgtagtagcggccgtactagtccgcgagaacgggagcacgggcgacgtgagcggcacgaactcgcgcgtgaagttctcgacgatctccggcgccagacgcacgcccaactcgaagcgcgcttgcagctgctccctacgactcgcagggtcggagcccacgaggtgcaggtagccgtgcatgcggtcgaagagctcttggcacactgccgagcgggaccacagcggcgcctccgtgagcttctgctgcagcgccgagaagtagagctgttgctgcagcagctcgtcctttagacgcagattgagctgctccacgtgactcgtgactgtcttctgcttggccgccgtgcaggccgcgagcagcacgttgtgctcgggcagcgccgctcgccacttggcacagagagcggtgaactgctcgtcgagcttctgcgcctccacgcgcagctccttgacctcatgctgccaatcggtaacaacaaaacaacaatcagccacagcaacaacagtcagtggagtctcaatggccaacatgtggacaatgaagtacacgcacgcaccgcggcggggatcgcggccttgcgcgtgggcgtgccggacgcgctgcgcgcgcctcctcgactggtcttcctggtgctggcgccggccgtggcgagcgccaagaaggccgcgtgctccgcgcgtccctgccgacttgccatacgtagcgcttccggacgaaaggaaggtctggatgtccgtccgccgccgggtctcacttggcggacgctacagtcgagcggcgaaacagacaacaacagcgggtgcggcctgctggcaaccggcgagttaattcacgcgcacgggtatcggctggaagtgcgcgccgccacgagcagcaagcagcaggtactctaaggcgcggatgatgatgcgggagccggccgtgtcagccaacacagacagaaaccgaccgatgaaggctttcgtctcgttgtctgtgtagccacccgatttcatcatggagtaaagtacgataacaacctgcgatttgtacaacagcaaccacaccagcaaccacttttgtgtacagaaccgatcctgtactactcagttctgtactcaaaagtggttgcttttctgtgcggtttattacaccgcatatcgcgagttcgtgtcacggtccaccaacaccaaaaccaatgctgtatcccaaaaggacgcaggcattgtctacaggtggcggcgagctgagccgcgaacaggacggtgccaaccacgtgccgacatgcctattgacctctaagaatgattaatgtctacttcaaaataactcgcgcaagttaatacgaagtcgtggattcaaaacaactcgcgcgagttaatatgaagtagtggattcaaaacaactcgcgcgagttaatatgagcagtggattcaaaactgctcgagttagtttgattcataacagctacatgcgtcaagctcgaaagttgctaaacgatcaggttggtgaagtgagaaaatgggcttagatatttcaacgaagctgtgtgactgggtaaaataccgtcaacattcaatcctgtaaaaacatgcaagaatggtaccaacaatgctcattaccccagagtgtgttggaatcgaataagaacgagggacatcgggtgtacagagagtatagtcaactaactgcacaagtaaatagcaatgaactaaacagacatcgttcttagcgagttagattgtggactataatttcgtggaccactaccgcagactcgcgtcctcgaggcatgtggactgttggtgaggctacaccagtacatcgtaatggtagtggtagatagccgtctaacgcccaacaaattcaaattccaaatttgatctataacgtcggctacgatgtaactgcacaacgagcaataacgttcatgagggggctaacaagtctgttttagtgaagttattgtgggaagctcgtattgaagaggtaggatatactacttgagcaagcgtttttgactggaaagtcacacgacttacagttagctcaaatgccactcacagcaagggtgtgcgcctttaatatttacccgtcggtcactatatagctacaattcccagcgaattttcgcatcgtagtgcacacatacatattgctccaaattcagacgttgtagttgcacctcaacgcgcctaggaatagtagttatagagaggttggttgagtcctaacgcctttatttaaaagtatgcagtgcgaaatggttcgtggtttgaaaccccaatgcggaccattgtgctgattgtcactaacatcgaggcagtgagcgttatggctatggatactcgttactagtgtaagtgaactctatataccttatttccaaaacaaaatacttaagtacttaagtacttagtatgctggttggctcgctgaaattcttaagcctgataaatttccctgagtatttttgagggttatacgttgccacttgaaatatgccagaagacccattatatactttagcatgcaaggtatccacgctagctgagtagtataacggacgcttaggtggttcagcacgaggcgctagaatacgaggtgataccttccgaactactctctatatattatcgaatctctgagtagagctgcaagttctgtataaatgctccacacagataaaataaaaaaatgcgtcgtaaccatacacaaccactaccatcacaacagaggaaacggctatccggtggcttagaggcaggaactggtgcgaaccttactaaaatgttttactcaatcggcatatactcacatgtaagggacaatctgggtatgttgtgatacattgcggtgcctggcatcctaagacaaactaaatgtatgcatttgttcacacggattgctttgtggcaaccgtgcttgggttgaactccgaaatgctcacgtataattaccctttactaaactcacagtacagtatactctagtacgtaccatttcaatttaaaacagtataattggcctcatatcagctccgtacctcgcatgacgccacattataacaactcctaatagctgcctatacgcatgcgcaaccggagtattctacacgtattaatacaacttactttatgatgtcgcgcgagtaatttaattcaaattaactcgtgcgggttattctgaagcatctggaccattttaacgcgcgcgagttattttgaatttgaaccaggcaaagctatactgagctcaagtacatgtacatgtagtttgtgtagcggccattcgcaggcgcccggcttacctggagaaagggcagtagaaaggacaggttgctagtgatcgaaaaagtggttgttgacgatcactttccagctcttttggttgttctcgtcttttttaggttgccattgtcccaaagaaggttgtttatggtccaaagttggtacactggcgacccggactcttcatcatgtagcgccgtagaggtggcgcgcggaggcttactgtttccagagaagggagctccgtcgcccgatgggaagcacgcggccaatccgcgcgccgcgcgcgccaaaagctttgatgcgtggagggctggaggacggtggaaaatcggcaggcactcagcaaccgaggaattaaataatacaagtagattggggctatttgtccaaacgtaagtagatcatggggactacttagaagtagactgggagacgttgattaaacgtattttaattatcaccctgctacgcgctgcgcgcggccctccagaccctaaaggctcgctgtgctcgcttggacagaaccctaacaagcccgctgcggctcgcacgcgtcgcctccgcttgctagaagggcaatgctaggtcctggttttgcatccgcgtgcttcgcacacgggctgaccaaccacaggcgtgggctcgcttcgctcgctgtgcgctgatggtctgatctacttacgtttggacaaatagccccaatctacttgtattatttaattcctcctcagcaatcccagcgccgttgatgcgcgcggccccggggtctctgcaccgcgctctcacgcgtgattcagcgcagaaaacacgctcgtcaccttacgacgtctggggggcggtgggtcgaccagcggagaccgtgaacggatgtcttccacggtctccgttgacctcttagtcggtcgattcgcttcgattcgtttcgatctcttccagcgcgaagacgctcgcaccgacgccgtcaccggcccagtcattacacgcagctatgttactcgcccctgtaaacatgaggcgctcttctgctgcttggactgcggcctcgactggtccgcgggaagcacgtcgtcgtctaccgccagtgtacactattcaagtggcttcgccgttgctagggcgcgcaaccacgaggcttacgcgtttgactgcaaagcgcatgacgggcagctctcgagcgccgccatttgccgagcgccccgatccctgcgtgcctgcctgcagaaacggcgcaagaaggcatcacgagctgcggattgcggcggcgtggctgaggcccaaagtcatcagcgtgcccacaattgcacgctggaaactgcaagcaatcgaagcgtgcggatcctttgagtcgatgcatgtcacgtgatgagcgatggatcgatcgcactgcgattcgcagaggctcggctgccagcagaagggctggtgctgctggttggctgttgggttggttgcagggcaggcgaaccggtggtggacacctgaaatggtgctttcgtccagtgcacgccgcgtggacaccttgttggcccctctcgccaatgcctcgcctacgacacctagccgaccggtccatgcgttagcacacatcacgcggtgtctgagcccgtccacaggctcgcaggctcaaggcaagatccggatcgacaccaaaattactgcatttcctactttacatgaagctctccaactcgttgcgtacatacgtatgccacagtatttactcggtgcgcgggctttggctctgctgctgctgttgctgctggatgtagccgcacacggtcgcggtgatcaggtcgccgttcagaatggggcggatgatctccaggtcgtccttgagcgccgggtcgtccggcagcatgttgtagttgtagacaacggcccaccgcagcgtgaccgccaccgtcctgccggtcacggggtccttgcgcggggtgatggtcagcccgcagatgccgtactgcgacggccccgtccggttgaccgggtgcagtgggtcctccgtgattgcgtcgatgtggaccatgccatgggatggcgtgaggtccgagcacacgacgttgttgacgatggccgggagccccgcgccgttaaacgtcgagcgacggtacaccacgggcgagtcggcgctgttgagtctggtccgcttggcgttgacattgaagtggcgcttcatggacgtcgggatgccgtcgaagtaggccagcacggccgcgtacacctgctcgagcgacgtgtgcgggatctccgagatgaagacgctcgagatgagcgtgcggttcttgcagccggtgatgtccaagtgcgacaggggcaacaccggcaacaccggcttcttgctcttgccctggtgggccacgacgcggtcgatggccatctgcgcgaacctgttgacgatcgacggcagcgtcgcgagcgagcgctcgttgtgggccagcagcagcgtctccctctcttcagcgtcgcgccccaggtgcgtgtcaaagtgcagcgcctcgaacatcgcctggccgctggagtgcagcggcgcccgcaacacggcggcctgcagcgtggcgaagagcaactgctgctgcagcagcatctgctgcagctcgttgtgcgccgcctcggtctggatcgcgccgtgcttctcgcgcgccgagcgctgcgcgatggccagcgtgcgctggtcgggcagctgcgcggcccacttgttgttgagcgcgcgcagctcgtcctccatctcggcgacctgcgcgcgcagcaggcggatctcgtgcgtggctgtgagcggggctccgttggccgcgcgcggccgcgggggcgccggcgtggcgcccgtgagcacgcagatgagctcctcgttgttattggtgctgttgctgtctttggtgggggacaggcgtcggcgcttcttggtgttgctggagctggagctggagcggctggcggagtccgggctgcttggcgacgcggagaaggctcccatttcaggcagcgggggcatcaggatcacgttggtcgggtgcaggctcatggaagagctacagtggagtaggaatcgatctgttcgctagctggaaaattgcgaactactgcagatgagagatgagttgcagagggtggctgcgtcccccgcagatctttatacagcgatatgagagcgcgatttgaagcgcgttgcggttggggtgttcctgtcaaaacgaaaacaaccgaagcgaagacaggcaaggcaaggcgcaatcaaactcgggcgcttgccacacttcgctttcgtttgtgcgggcggactttactctgctgcgatgtgctcgtcatggggggcagacatgaacatcctgcaggatattgaccggaggacagcttgttaactgatcctgtccgatgttggaccattgtgacggaaacctccagaaatcagcattgtcgacgtcaccggccgcgtgctgtacagtaatctgcccaagtaaggaacgcctgatatatataaagacgcagaatatataaattgatgttaagtcgagtatacttttccaatgtactgatttagtaatttcaacatgaactgaagagcagctttacctacgagtccggaatgattccagcagtggcgtatggtcgaagcactaacctttgaccaggcatcctcgcaccacaacagcgctgtcaactggtcgacctcgtagggattatctagcccttcaccttgtcgaggatgcccactttctcagaccaagtgaggcggagacgcttggacggtgtggacttcatgggtggagtgggggaggaggtgggcttgtggggcgaggtgcaaaagaaaaagtgcgagtctaccactacgatacatgtagtttgaagtctagtaagatcgctaaatgcgcgccatttttcaaacgagggtggatgattggaactggatttttcacctcagtaccttgcagtaccttgcacatccccctatcgccacatcgactggaaaataatattaaatatgtgaggctattagttatacatccgttccttattcgggcagaattctgtagtgggctcaggccgctttatagcttttcttgcttgtgagagcaacacacgcgcgttcggggtaacacaacacatgccagcataatcaaatcgggggttgcgtagccccattacccgcaataaagcatgctttggagctcccttcggctgcgcaggttcgtttacgaagtcggtggctacgtcccgtaaccccgcatataagaacgtgcttttaccgcgagtgcaatcagttgattcatctgcgacgcctcgaaaaagccacttgagctcgtgtgcactgcgcgattgtatggcccgtagaagagagaatcgaaagccggaccggcagatcgccgctgcgggatgttgatgagatgatatcgggcgggcgatcaacatgccaaaaggttcgggatgccggcgatggcagcgattgttgggttgttttttgtctgtgtgcgcacggggaaggcggataggccaccgccacgcaaggacagcgtcaactacctggctgcgtaagcccgcacgtcgtgacatggagctgagcggacgaagtcgctcgtcgaagttgcggcggccccttggtcgctgcggtctcttgcagctaccggattgctaccgttgcctcggcgactgaaagctctgttgacgggtattaattacttccgtaaattcgaaagctcggagcggggtgctttacactgtacgacagtggcaaagcctttcatgaacgaaaaacaaaagctttgtgctggttccgcttgtactactttacgagctgccagaaaatgtgtagtaatcgtgaaaacaatacttgtacaaaaagcattgcctagctgagccgagcgccgccgagccgcgtgagctatgcagccgccaccattttgattcctctttttttgtggcggcatgaaggttttacaatcgacgtcagacccgggaaatgttgctgccggcgagatttggcgcagcattctacagtgtaccttgatttacagtacactaatattaccagcggaaggctcaatgcaaatgcaaccaaatggcaaccttgtccgatccgaggtcgcgtcctgatctgcgaaaacttgccaggttcttcaggataaacaagtggggacagtgcttcaaggtatcgataccggtaaccagcagggacgatctccgtctacaagattaccgaccaaaacgcggcaagtcgaagcgttgaagctttggacttcacattctgggattctgtgaaccccagctcgtcacgcgtggcgccgtagcgtgccacaagagctgtttttggctgttttggtcagaggttagctcatgttctagggaagcagccgtggaggacatccttgatgcgattgcttgctcgtcctccgttctcgcactcttctgtcgttctctgccccagctcgcgttccccctttttcagctcggagcaatattttcttgagattgaccacaggaccgccaggtgggtttaccgcatcgccagcaggggaaaactcatccatggtttgcgcataggcttccaagctactgtacacagtgccgactgcactttagcgtgcaagacaagaatctccatgtcatggggtccacggcaaatggaaacccaattgtccaactcatggaatgcatggagcgcgcctccagccttgacaagggggcaatgacagatccgacggtttatctggccgtaagcgtgaagcgtgcattactcaattttggaaattcttgaaccgcgcaattaattgacgctgacggtcgttgcttgaaaggagccttgcgattacagctgcaacgatctctagcgaagaacgatgtgtgcatgattgcgagtgctcattccaatccgttgtcaactgggcagcgagcatcgcatcttgtactgtgtgcaatcgaacccacctggattgtggtctggttgtggctggtttgctgtgtccactcgagtcaacgcatccaacttggaacaccttggtgaagacgcatcggttgatgtctcccaatcgtgcgctaacggggttcgaggtgctcatcaccaagtttccgagcatctttctccatgttatgatgcagcgaagaatgcaatgcattgcatgccaccagcacggtccaataccacacgacactttgacgtgcgtgtgcacctgtattaataggtatacttctccagtaccagtgtctcgggtgcagcgattgctggccattgggccgatccattaagaagtgatgatgttattgttgactcaggaattctgagccgcgaaggtgcaaccacgttcaggcattcacaagaaacaccatttcaattcaaaacataatgtgtacctactattggcagataatagcttagcttcgcggcctgcgctgcagttcctggatgtacccgcacaccgacgccgtgatgagatcgccgttgaaaatggggcgaatgatctccaggtccttcctgagtgcaggatcatccggcagcaacttgtagcggtatacaaccacccaccgcagcgtgatagctactgttcttcccgtgagcggctctttccgaggcgtcatggtcagtccactgatgccgaactctagcgggctcgtccgggtaaccgggtgaagagggtcgtcaatgacggcgtccacgtgaaccataccatgcgacggggtgagctcagagcacacgacgtggttcacagtcgcaggtaatccggccccgtcgagactcaatcgccagtaggaagcaggctcgtcatccccgttcaacctcgtgcgagtggcatcaataccgaagtggcgcttcatggttgaagggatcgcgtcatgatacgctaatgacgccgcgtacacatcctcgagcgagttgtgcgggatctcggacatgaagacgctggagacaagcgtgtggtccttgcagccagtgatgccaatctgagagagcggcagcacggatttgttggacgcaccctgctcttggagcgccagcaccttgtcgacccccatttgcgtaaaccgtctcatgattgacggcaccgttgcgagcgcgcgctcgttgtgcgccttgagcatactgttgcgttccttacggtcgcgtccgagacgagtgtcgaaatggagggccttgtacaaatcctttccgctggagtgcagcggcgcctggaagatggctgcttggagggtggcgaacatcaactgttgctgcagcagcatctcctccagctccatgtgcgcagcctcagtcagagccacctcgcgtttcttgcgagcggtgtgctgggctgtcgccagtgtgcgttggtcgggtagttcacgggtccacttggtttcgagaccgtggagttcggcttccatacaggcgacttgggctcgcagcatccgaatttcttgcgtggcactgagaggtgttttgttggcaacgcggggtcggcccctcggacgacgcgcccctttcagcgcggaaatgacatcgtcattggcttcctgggatcgacggcgcttcttggacgcaggttctgggtcgcgggacattgacaagctcggaaacggggccatagggaccacgttcgtggggcggaggctcattgggttttgctgttggaatcgggagtgatgtggagaagcggcggagcgcggatgctttgatcaggagagggcaagttgcaaattgtgatgccccacagaaaaggctggctggctcactcgaggctcgagcgagctttgcgccggcggctgtttttcgtgtttggagcgtctatcctgatttgacgcgggacaccaacaaacccacctgccgatgcgacagactcgagccatccatccagtcattcgtgcagacagggcaacatcaacagcaacccctccctgagcctttcgattacgaggcaccgtaagaaatcctctgtaagcgaacgccgcaaccaccttcttctactgtaaggtttcgttgcatttgccaccaaggccgcactgttcagcgcgaacagtggtcaagcaacagcaaagcattcgctttgtactttcaaaacttgcatacagtttaaaagaaatgatgaggatagtgttcagtgttctacagtacatgtatcgcgaggagtttctcgagctgtgggggttgcgttgcgcgttacaccattgctccgactgcctcacccacccctccacgcatcaaggctcaagattctcccggttcgtcagcttcgggagagcgtaatacgaatgtgggggtgctgttcaattaatcagcgagacaagttcaagctggtgctcagtgccagttgggagggcctgtacatgtacacatgcgtgtagcggcatccactgctgtccttccacaagacgctttgagattcgtgttctacaagaatcaaagccccagacgcagtgtacgtaaccttttgatggacgcttgataagcatgcatggcattctctatggataagtgggcatggcatgcatggctttctctatggatacgtgtacatgcactcgagctcaacctgataatgcgattctcacagtcattcctgcagtacatgtacatgtaaacgaagtctgcttacattctccatccagctgctgtgacgagccagcagtgagcttcagttctgttttgaacacgctgacaagcaatgagagtcggcgattcacgtgttctgtaagccggtggggtgtggcgtctgctgtagtctacaccatctgcaggcagggtagcgcaacccagcgtgtgttggttgctatcgtctgcttcctggctcggtggctgaaccaactggaaggtgagcaatggttatggttcactcagttgcgtcgacagcatctcgtaatactgtagcgtgatgtacggcagctttgagtgaaccgttttttaagctaaaagctggccgcagggctgttgcagacaaagacaaagattaccattgagaacgcagcaccgttctattgacaacacccaaagagtccatgtatattaatactgtagtcggatgtggacccgaaaccttacggtggcgacggaactgtcacggcggcaagcgtgttagaaatcttcacagctctgtaaaatgacaacggtcaaatcgtacgagcttcccgcggggtaagcatgccgttgttgccgtcacttgcttcgatgagttgcgtttcccttcaatcgtgcctttccagtcatgaactgtaacccgctacacgcgtgtacatgtattacgcgctaaattggcattgtggcttacggttcgcggttcgctcgttcccactttcctcatgaatacatggtacctgagtgcttgcccttgatgagggccttcattggaagagcatgagtgcatgtacagccagtattgacaccaaactattcgagtagttttcaagagataatgccagtttgaatagctttggcttgaataccgtttgatatcatttgatacaacaaaattctacagcttactataaggtggtcttggaaaatcactactgcgtctgcggctcgcggatatgactgcacacggaggcagtgaggaggtcaccgttcagaatgggtcggataatctccaagtccctccgaatagcagggtcgtgtggcaacatgttgtagcgatacaccaccacccagcgcagcgtgatactcgacgtcttgcccgtcacgggctccttccgaggcgtgatagtgagcccgcagatgccgtactgcgacgaagacgactcgggcacagggtgcagagggtcgtccgtcacagcgtcgatgtggaccattccgtgtgacgccgtcagctccgagcacacgatgttgttcacagtcgctggcagccccgaccctttgaaggtcgattgccgatacacaaccttagactctgcgtcgttcagccttgtgcggttcgcttcaactccgaagtggcgcttcagcgacgttgggattgcggcgaagtacgccagcacggcagcgtacacctcctccagcgaggtatgcgggatctcggagatgaagacgctcgagatgagtgtgcagtcctggccaccagtgatgttgatctgcgacagcggcatcacggactcctcggtggcatcttgtccctccatcgccttgtcgatggccagctgcgagaacttgtcgatgatagacggcagcgtagcgagagaccgctcgttgtgtgtcgtgagcattgtctcgcgctgctgatggtcactcccaagttgagtgtcgaagtgcagcgcctcgaacatctcgctgccgttggagtgaagaggggcgcacaggacggctgtctggagtgtagcgaacatgagttgttgctgtcgaaggagctgctggagttccttgtgcgctctctcagctaggtccgttgcgtgcttctcttgagctgatcggagagctgcagccagaacgcgctcttcaggtagctgcttcgaccacttggactgcagacctaccagctcttcctccatgctcgccacttgagccctcagcatccgaagttcatgcgctgctgtaagcgggatgttgttggggtctcgtggtcgcccacgtgagaggcttctaggccctgtgagggctaacaagagctcctcattggtaccaggaacatcactcgagcgtcgacaccttttagcctcacgagtgtttgaacttggttcgggaaagcttcgagcccgacgaggcgagtccgttttcagccgaagagccttgagaactgggtctgtggggcagagttgcatgctgctgcagtgctggggaggcgggcgaaatcgaggaatgagctccgagtaaattgtacatgtatcgggtcaaggagcgccgaacgagcaaatcgggttggtaatctctgttttggcagcttgaaggatgcggtcttttcggtggcttttcgttagtttgtgctccggctgcttttcagcgaagggatcacaccacgcccaagccctccacgcatcgcagctctcgacggcaacaccgccacatgatcgctgtagacgaggttgccttttgattgctgtgcatttaacaacccagcgtggcgtcggtatgccgttcactgtgagccgacatgattgcagataagcctagcgcttacttgttgcttttcacagcagagataaacggaaaagggcttcgtgtattagagcggcgcttcgcttcatcgcactgcgcgacgacggcactaaactgcttaacttaagtactgtacagcactcgattgagttgcaacgtgcaacgaaccacatcgcagctgtacatgtaccgcaaaggatttcaccatggcagatcgcgggatctttccatgtggataaaacacggcgttggtgccctgtcctgcctccgagttgctgaagcacgcatttggtggtgtacgagtaagactggatctccgtgcaacggagtccgtggtgacgggccacaatgccaagatgctgggcatctgtgttaaatgcttgccgtagatcatgagcatgacagtggtaatagagtactgtacaggtagcgcgcgcattcggtcacttagctacggtagcactaaagcactaagatcagtgtccgaggctgaagtggtgtgtaccgcgtaccgtatcctcgtaggtacatgtagttctcttccttctgcgttctcaaagacaatgcatctgccaagtattgagatactagtgcgtctaccacatctccaaaatggcttgcacagtatctacggtacgctgttacacgtataatacactggcggtgggctcaaaatcgacctcttggtagtttggcgatttaatcggtgtcacctcgtcaaattgaataaaaagcgggattcagaagggcgacaacaagttatgaatgaagtgaagacaatgaagaagatgagagggcctagcaattatgttgatggactagtgggccaacagtaggaaatggtcgtcacagatttcgatggcgatcaacaacggataatgaccggtgagtgatcttggcattccgatcattgcgtgaagtgtaaccaatcaaaagttggcttctcgttaacttcagctttacaccttttcaacttcaaaaccgcaaattccaagttcaattctgcaaaaggtaagttcaaaactgcacgagcagagaccaacttttatacacagctcattggttggcacgcagcacagctagccaataggcaaattgtactctataatcgtatacgatgatagatatcatacagtttaaaatatacatttatagagtattgttgttatgatcttaccttttgctgttttgaacttacaatttgcagttttgaagttgaaaaggtgtagagttttttaatctttgcccattcagagacaggatgcgataggtgcgagccatgcgagcatttgcgattgcttgactgcttccgcgtgcagctacatcgaggacatgcaccaggagaactgcttgattcatgccggtcagtctgcggctattttctctcactgacagacgccccgccttccttcagaatctgatgacaagagctggcgtcttttgttctgataagctcgttcttataacaacgcaataaaagctcagctgccattatcgccattcttaccgaggatcacatctcaattttgcctcatccgaaaaactacacattcttctcagcgcggtcgtcatgagcgtctacccgctaagcgtcagtgcgccgtcagactttcgtgaaatgagctcgctggtgagtatttctaatgctaatgtcatggatcgagacgtcaagaagcgtcgacggtcgtctcactccgataacgacgcgattgtcaacttcaatggagccaatccacagagcaagccgaagacagccaagaagcaagctgtcagcgctgcaaacgagctccggatgctgcgcgtggaagtggcctccatggaagaacagctacgcaatctgaagctcaagtggtcgtcgacgcaaccggatgaacgcacactggcggccgcggcgattcagaccgaggctactcgcagtgaactgaagcgcacgctgttggagcagcagattttcttcgctatgttgcagagcgcagttctccgagcaccgctgcactcgattgggaaggacatccacgagatgcttcacatctcggtcgtgactcggcagaccgcgaggagacgctcaaggcgcagtgcgcctggcgcactacgaacgggctcttaccaccataccatcgatcatgaatcacctcacagaagtggcgatcaagaaggaaatcgcagagagaggtgagctcaggacacctctgtcgcagctagagattacgggctgcgcggactgtactctggtatcaggcgtcttcatgtcagaggtcccgcacacgtccatggaggtggtgttcgcaggcgtgttggcgttcttcgactccatcccgaagtggatgaagtgccactttggcgtggacgccactcaacaggccagactcgccggcgatctactggaggtcgactctcaagggtgttggaatgccagccatcgtgaaccacatcgtttgctccgagctcacgtcgtctcatggaatgcttcacatggatgccatcacacatgaccccctgaatccaattccgatcgccagcccgctgcagtttggtatctgcgggttgacaattacgcctcgcaaggattctgtgatgggaaaattcacgtcggtcacgctgtggtgggcggctgtgtatcgctacaacctgttgccgaatgaccctgcgcttaaggcggacctggagatcgtcccaattctgaacggcgacttgatcactgcgtcagtgtgcagttaccttcaggagaactctgcctgcatccgtgaaaactagatagatagcggcgtaataaaccgcaatacagtagttgcaacgttggagcttccgttgagtttttcttcgagggccaggccaaggcctctttttcgaatctctgccgtcttagtcaaattttgagggcaggacttacgtacacagtctattttcggtgatatcttggaattgtataggcagcccatcaccccacaatgtgacgacctcccgcaggacggatgtcatccgcgggaaatggctttgctctgctgcgctccgcaaaggcagtcgctgcgctcctgcgataaaaagattctctcacctggcgagaacagtgctcggctcgctggaatgctcgtcgctgggcccgcctccgcaaataccgcgcggccctgctacgcgggcaccccgcgcgggtttgctgcggctacgctcctcgcaaccgctaccggtagcctccgttggtcctcttctatatcacattcaccccccctcaacccccatcaaaaaagactgtgtacgtaagcactcccaaattttgagagggattgataacatgcactctgcggcagttgcggtgtgaaagatattaaaaatatctgtaccgtacatgatattatcatgtacggtacataccactatttcttagccaaggcctctatggtcttcatcaagcttcattgctgcacgtactcgaccaccaagctcttcgtcaggttcagccagctggccggctatttgtcagcggattgagttgtgagaggggctgcctgataaacagcgatagagagcacaagttgcatgagagtcattaaagcaacattgaaaatcagcctcaatgtgtgggatcaataacattgatggggtccaatgttgcgtgatcgctaacattgacgcaatgtaaattttccagacgtgaaatttcatgtttggagcgactggctcaacagctctcatttcagaatctaccgggtaggaagcaagcgcccgcgcgctcgctccgcctccgcgtcgtgcgaccgtctgcagcggtcacccgctcaaccttattctaatgtgtgcatgtcctactgcggtgcttatatgcatgtgtgtactacgtatgcgggagcaaacgccttcccagtgcgttgcgttgcgtcaggtgcgatgcgtgttgcatgcaatcgaatgcgctaccttctaagcaggcgtaagcgcttttaatgcgcctctagctaacagcgcagttaggtaaagggggagggcgagctaacgcgagcgcgttcaccgatcgtcaacacccgccgatcaggcgggggcgggtctgcgcgagcgagcgaaggcgagcgctgcaacccgatattttttcctagacaccgcgcctggccgagccgaggacttagcgtaaggcacgagggggtggggcaggccgcacagcggcgccccccgagcgaagcgcgagaggggcggccccccccccgaagtgccgtcgctaagtccgcaggcgaaagccaacgcgagagtgtcctgccaactaggaatagacaacacgtggcgcccaggtagagctgcgcgtagatcccgtagagcccattctcctgctgcatgtgtcggcggcgccgactcggcgcgtacaccatgacgcgcttgccgcgttagcggcggaagcacgccccgagtgatacagcgtgcttcgctgtcgtgctgtcgagctgtcgtggcgacgcgtgtccactattgtcacattggtaaaccaaatattctgctacgagagataccgtaacattgtgcaatgttaggcagaggcaccattgttgcgctcaatgttacgcaacgccaacatttcaatgttgctttaatcagtgccaagttgcattggcaacagctgaagttgcggcggagcgttactgtttgccttgcgatcggacaccacaattgcacaagtactgtttggtgtgttgaagacggcgatttctggcaaacatgtatcgacaaacatgtatcgataattaccaggtaaatccgatagttccaaccctcgatttctctaaaacaacgcgaggtatggatactaagtatcataaccaagcaaagcgtgtaaaaggggtttcgtgcctttctttggtggactcgttttcgcgggattgtacctgtagacgtacgaacgtaaggaacgacgctcgacaaggtagaagagtgcttgtgtacgtgcaccaaagtgttgtcgcattgctccggttcacttgcatatacctggcgaatctgtaatctcttggccgacgcaccagaaacacctgagcgcctcagatccttatgatctcgccgccacaagctcagtcggtagtttatgccgtcgataggcgaacagctgcctcaaggctcggttgatagactatcatctgagaaagggttgggccaaaccctttctctctccttctgcagccagcgtgagatcacaattccaattgaccggcacccctcactatagtattgtctcggcatccacgcagagcttttagccccccatcatggcttctcgtcccgatagagactcgagcttcaggtcccagagctaccccgataccgatcccgacagctacaccaagaagcgggctcgaccggtacaaacccacgatgaattaatccgctgcttcactaaagccccggaaacgcgtcggcgtggcagaccccgcgtgtcgaacgcagccccactcagcgccacgcaggagattcgccgcttaagagcccaagtagcgactatggaagacgaactgcatgggttgcagtccaaatgggccgaagaactcccagactcacgtacgctggccgtcgcgcaacgctcggcacgcgagaagcacgacgtggctcagactgaagccgcgcataatgagctccaggaggtccttctccagcagcaactgatgttcgcgacgctgcagtcggcgctgctgcatgcgccactgcagtcgatcgggagggatatcttgaaggcgcttcatttcgacacgcaccttgggtgggattcagaggagcgagagaaggcgctcatgaggcaccgcactcgatctctagccacggttcctttacttgtggataaactagtccaaggaccgatcagtaagaaggttgccacgaggaggagcgcggacgtggacaaacccgtgacgccgctctctcagatcgatatcacgggttgtggagactgtacgctcatctctagtgtgtttatctccgagatcccgcacacctcgctgaaggtggtgtacgaggccatttcaagatactttgataacattccgacgtggatgaagcggcattttggcgtcgacgcgaagtgtacgagactcaataaagaggactccccagcggtgtattggcgcctgaagctccaagggagcggcatcccagcgtcagtgaatcacgtgctctgctcggagctgacacagacctacggtatgttccacatcgacgctatcacggatgaccccctgcatccagtgtcctcgaaggacctggtgcagtacggactcaacgggatcaccatcacgccccgcaaagaaccggactcggataaggtggtgtcggtgacactgcgctggctcgtagtctaccgctataatctgttaccagacgatccgaccataaaggaggagctagaaggtatccggccgatcctgaacggcgacttgatcacctcggctgtgtgtggctacctccaagagcagcagcaagcaagcccctagaagtatttttagtttagatgtagctgtggtcgagataccagaagtctttgttgtccagtggcgtttccgccggagttaccgcgcaaagctcaatgcccgcagtatggcgagttgccaaagcgtttatcgtgttgtggtaggaaaatacacacagaactaccttattccggtgcaaagttgaatgaatccatgggtactgaaccccacctctaatagcattttcatatagatgtagtgcggtgatgcagcgcttagtgtttctttacaagaccttttgtgggatgcttctagacgacaacagagcatgacaaccgctggtcaacgagtggagagattacacaccatcactcagtgttttgtgtaaccataaagtgtagcagcacctagaaattgtgttgggatacccactgtataaataggaagcaccacctagaatataatgaaaaacaccgactaaaatagagcagccacccacttgtaggcgacgggacactaccttttagcagttagcaacttgccatggagggccgtgaggaaaacacagccgacaccctggggtctctaccttcttcggactccgacagcgcagatgaggttgaatcaccaaggtggactaagatctgggcatcggcgaccgcctctaaggcgtttgaagcctttcgtgataccctccctaggcgaagcatcaagaggagtgaccgtacgaactgcacaatcgaccatctactcaacaagaaatacgctctcactactgccatgtacaagatgcgagttcagactacaaagtgccgatcgcggcgatgccatcctcatcgctctgaagacgatgacgagaatgactcagccattgatgccccgggggactgtccatgccgatataaattcaagatttgccaatcgtccgatgtgcaggaggtctttcagcgcgacgcccacctggcggatgtcgacgggtcctccagccccatcgtgcgcaagttaatgcctgagatgaagaccttcatagtggagcagctcagctcgggtgtgaaaacgacggcttcgcgtttgtttgccgttatctgtagcatggtgcacgaaggtgacatgcgtgggcccccgcccgaagaccagcaggttgtggactttgtgaaaaattggagacggaaaaatcctaacaacgaaatggcgcctacaatcgagatttgcaatggccaccgctacgagcaacaagatatagcgacattagacgagtttgagatgatgatcctttacgacacgcaaccggatgcacgaccgggaagcttaagcattgtgtcgcgcttaggagatggatcagaggcattcccgtttcgtgttgggatgacatgcattcggcaaatccgcgattacatctcggtacagaatcgcagtgactgtacaacgattctgcacctcaatagtacccatagcatggccatcaatggctactcggtctttgcagttggctactcggatcaaagttgccactttgtgccgctagcttacttctgtacatcccagaagcggaagctggatatcggttggtgtcttcgctacattaaacgggtctgtgtggatatcggcaatgtaccttttgcccctcagtacgtgatgatggacgctgacaaagcccaattcaatgcatccgtgaccgagctgccccattctaccgttctaatgtgttggttccatgtcactaagaacgtgtggaagtacgcagcggagttccgcgtctcctacgacgacacggcagctgtgtttgaagatcgctatgacatgcactatgcactgcggccggattttgaagctgtaaaagcgcgggttttggggaggtggaggggactagctgcaggatctgccgtccgcaaacttacagaccatgtgataaagcagtggattgagacccagcgctttgctaaatggcaggcgttctacaccccgcgaggatatgctgcaaccaataatccgcttgagcagtatcatcggcgcttgaaactggagtgcccaagcaatgagcatacgcccgatgaattgatcaagagtcttaatggtgcgcggcttgcttttctgcatcgaaatgtgtttttttgcaattttcctacagcctcagaaaggctcatgctcctgtacaggcttttgtgccgccgaggttgcatttccgtagagcgtctgcctccgattgggactgtccaggccgatttgtaccgcgtcctgcatcggcctttggctctaaccgccacagagaagaagtcggtgaagcagtcaattaaatccgccaatacaaggcgcaagcaactcgaaggcatgcccgctgcgggctgagttattgatgtccgcagcaaggcttgcccttgcccatatttcgagaaaaacggtgcctgttgtcatcttgctgcagcgtgtatccatgcaggcgtgcatatgccaggcgtagacaacaatggcaggcagttcgtgcacccgcgtcatcgcgcagatcgggtgcgcgtggaatctgcagctgtagttggtgcgaatgctctggatggtgtcagagcggatcccgccgaagatacccccactactcgcgtccaaggactgcaacaaacccaagaactggatcaggttgcaggcagcagtacgattgaacccgatactgaacggcaacttctgcaaactatttatcgcgaaccggcccctgctgtacagcaggtagaacagaacgatgggcgtgatgacgacagtacgcaggatgcggtgtcggatttgccatgtacgagtactcagctatctcttccagcagccccaattcaactttcggtccagctctctcaggacgaccgtgagcccgaaaacgtccgaagcgggcttactatttgtcctgttgtcgaattggcagaccaagtcgagcgtccacgtggtggtgggcgcagcactacatcggagggccctatgaacacaaatgtgcaggtcggcgttcgtcgctctcgtcacgcaccaaaaccaacgaagcgatcgattgagtctcgcttacaaaatgataagcgggcacgaacaactatcgctaagtgttagaggaattatgcttgctcgcatcttttatcattctacttatctctcaatataccgttgcattgatattcactaaaattcaggtaaaagttttactgacggccaaccttacaagtgtgacctcgatgttcgcctgaccattctcatctattgtttattccaggccatgtatgcgcgcaggattgtctacacgatgacgctcaggtgcggcttgatcccgctttagtctgtgtgacgacgctcgtacatgacaggttcgtggacgtcctcgaccacatccccgttctgtcgttaaacggatcctcgtcaaatgtcgagacgcccgccaaggtgttcacagtctgcacgacaagcgacgcgtgaatgcgggtgagatgattaagatactctagcgcgtgacggcggaagttggttttcatgatagggaggtgttgcagcagtttgttacggccacatcgcccgggactgtcgggtcttcgaccttggccaaattaccgccgtacccccgtcggtcatgcggatttgccgtactgagcgcttaaagcgcagagggattgatgcgtggtggcaatcgcgttgaatctgatgagctagtcgatcacttctctatgtgtacataggcaacgaatatacgtgcttgatcccttcctgtcggtgttattacacgtgagtatgatggcgaactcctattccattcgtggatatgctatattggctatgtcggtgattttttgtattgctgtggtggtgttcacttaagtgtaggtgctacagccgattctttcggtgctgaaacccccccctcctggtcaacttgcgagctttcatgatgaataaaagcggcattttgaaaaactagaaagaggaaggtctacatgtatctagtagagcaaccaacgattaactggcgtcgcctcggtgcagggacctaaaagtagacttttccgtgcaactcaaaaatgaggccctggaaaacggccccaatgagctcgaaagcggtattaatccaaagggcttgttctcacgagcacaatggtagccgacatagtcgcttacgcgaagtagttatcgcgttatggcccccgaaatgacgagttgagcgactcttcgtcgtaaattacagaatatatttaaatccggtaagatatcagaaacgtcttgtggtggtaaatatgactgactggcctcgtagtgcttagctctttattggtcgcagaccctcggtataattcatccacatgatgctacggtgaggcataccaaaacacaacaactgacagagcacgcgtatcaccagggtccgttggtgtcatggaaggcgcttcttccccccttccttccttcctccctccctcccttcctctcccctttctctggtgtctacagcgagtagcaaccgctctaaaatgacgttgataatattatcaacccaacagtagctacaatatcaactagtgcccgtgcatctacacctttaccttgtatgcaaggtaatctagtggctttcttctcgtatattgttgcagatattggacggatactctattgcaagtatccctcctatagattgaagcaatgataaacgattagaaacgaaagcgggaaggcagtagcagagtgagcgcgcttagcagcttcgatttgatagattatggtgaccctagagagctattcgcagcctgacacgaatctctcattcgtttgtatttacctcgtgcttttccagaagtcgcatcggaaaggtcttcctcaaaacgtagatagagttgtcaatgtaagtggggtgccatcgtccatgcgacgcgaattcgtttcgctaggttaaacaagtcccgacaagatccattggaatgcatgtcctgtattttggcactttgtaatccgttgttggtgcgagatcgtgatattttttacactgaggttgtgaagaccaagctacttgcattcaaactgttattgtttagccattgattggcagtgagtttacgattgtgggtctaaataaagtgttgcttcttatgccttccagttagacgtctccaccttcgatagctacacttccattgacctggctttggctgaattgcttggaattcgtcggtctcctaggtggcaatgccttgccagatttcttctgcttctgtagaagggccgatattcttgagcgtattttgttttcgcctggcaaattgtagcgtcgaggatacgctttcgtaagaaattctcgcattctggccggtcccatcttggtactggcatcagccaccccgcgattgaagagcttctccacttcttcactgtacagagcaatatattttgcaccgtacatgtaccctttcttctgcctgcgagcccatcctggcgctaattgtttctgctctcgagtcattttgacgcacttcttcgccgctgcgattacctttctgcccaaaccggttgactcaattatatcactaaagtcccccctgtttgcatgtccataagagtccgctttgcataagcttcgacgtctttttcagaaaagtcacagccgtgtgggtcattaccaagtgtggggcgctcacatctcatatcgctcgtccgcatccgcagttgaccaaaccgagtaatttgaattcctgatacaatagaacccacaactgttgacgtttcacttgtggcttcttcatcattcccaattggctcaaactgctcacattcatcttcactgtcaaactaaaattacctaattcgatgtcactgtccaaagtgtcatcacgaagatccaatttctggcgattacggtcatgagtcgtattgcagtcgcaccgaccaagtgtcggacacacacacactatgcatccatctccaacaccagaatattcaaatatcgtgagtttgaacgatggccacgttttgacgtcaaaacgctctttccatagtgaagggggcgtaaaaggcggggacctcattgaaacgagtaaaaagtcggcctaacgacttcgccaacggctccaccgcttcgtaaacaaacttcatcttggcgcgattgtattccactaactccactatacaattcggaagaccgccatcagacgttaaagctgttaccacttcctgcggggttgtagcgtcgtggccttgacaaacccaagctttcactttacgcgttgcagttgcaaaatgggcacctaggacgcacttcccatcttgggtctcagagtggatgaaccgaacgacctcgatattgttcaaagcgccaacgagaggaagcatgagcgctagatacgtgttttgataacacgaagcattatcggactgaaacgtcacgcgcttgacaaatgggaacgctcggtgaaccgacaataatatcccctcaactagtgcgaccacagattctttatcctgtttgctatccccgtttgaaatttgatcgacgtacacgttattttcgcgagcagaaccactggcagcatcatacgtccagtaacgaagtagggctccatagtgatcaacagtcttttcgcggaaatagattggctcaagtttcattttgaaatcaatgacaatgatcgcatcactactgcccctttcatccatacacttggtttttattagttcagcagtttcgtgaatcgcccgctgctggtttgtgacccgtactctgtgacccaagtagagctccattttttcgtaagcatcgtccacaacttcaagtgtcgttggatcgggatttgttgcctccaactgctgccggaggtcagtaaaaatggtgtccatggcgatacactgctggcaactcactgcacgtgataacgttttagtagcgccgcttgatgcgttgagcccatttgccgcctctgagatggttcttgccgacgacttcatttcagattgagctgctttcgcacgcgaatgtttaggtgccttcttcttgggtttcttcggcttggtcgtgtctcccgtcgacacaggaggggtcgcaagcccaaattgaattaagtgccgggggcagtgactctcttccagacgttgaccattctcgaacgtttgttctccaccatacttaagccactcacgcaaaatagcaagacgttcgagcacactcgtgctggttgtgggaagcagatcacggacaatacgatcgagtaattgaaaattatcgttgatcagaaacccagtgacgtaatttactgccttccgaggctgtgacgtaccatgcgtcaagatggcggctagtcgataatatgttcgtgcggacaccatatttccaggggttcgttggtgcccatactggtcaaacattacatttatcggtttgcgcctctgtatggcaggaacagatacccgctccccgtccaacttgaccgatttcgtcccccaagacagaaaggcaacgttttccatggagaggatgtggcagacagcttcagacacaactgctgggtcgaatctttgccttgtgactttactcacttccagcgcaccttcatctaaaaggatctgaaaatctctgcaacccgctaagtgagctttccgtccaatgcaaactccattaacatcgatgcaaatatcttagaggctcttcaacgaatatgaaccgcacagtagcgcgcgcacacttcggtattcgagagagcccttccgcgttttcgctaatacgttcgcagacgtcgtcaccaatgtatcgttagcacacgtcaccgggtttaaccaggtcgcaaagatctctaaaaacgcactagatgcactggtgccgcacaacgtttctgaaatacattgcagtaatcgaaacacgagattggacgccacagtgcgctgatatgctgcatcagtcgtgctggagtccgatccgttcagaattccgctgttgatcgtgttttctttgacggtagatgctttagaaaggatttcacttcactttcgggaagagaaaaaaacttgaggagtgctcgaattgttggaagtgtccggcggacaggggttggcgttaatgtcggcggactcacaaacattcgttcgacttgaatccgattcgaacgtcgcaaacgcggggatttgaaggggctggaattattataactttgaccttgttcgcaactgttatcagcggtggcatcgatttcagcagcatgtatcacctcgccgtacgactttgggacactctcggcttcgttattaccagcgacatcgataagcaagtctctatcagcattttccgtctgcacaccaaagcttagtgagcgtgacgcctgtgatttccgttccgctgtcgccacgaacgcttcaattgctactggagtactaaccccaattcgaggctctattgcgacagattttccacgctcgacacgggggctgcatgcgtgttgcaggtcgtgctcgatcaccgagccatcacatctactccacttcaatccagttttatcgaattccccacattcatacgccacacaacacacctcactaccagtatcattacccatatcccgtgaaatctattgcgaaacctgcaccgaacaccactcttcaactttaccttcttttcgtgcgccgcatgcagcatccttctggtgctgacgcttccgagattgtgcattgccagcactacaaaccacagcaaagtcgataggacgtcctgcatagcatttgatgtctgctacaaggttatcacacacgtatcctcccatgtgatcgacgctgctcttcgccgctttctccgacgagcaccccttttgaacatcttggtcagcttgaaagaggtccgaattctcgcgtgctgactgcttcctgctgtcggtacatgctgcagcaaagcttcctccacccccagcattgcgttccgtgcggttagcgccaaaatcattcgcgtgggcagccctctgaacgcgcgatctgtagccagcgagtgcagcagccttgattgaatccgctatcaggtaagaatagtgatctggaccatttttgcggcgttcctggatctgtgcttgggatgctcgccgtgcacgagcttccgcaccagctttggcggcattagcaattgcaattgccacgttgacgcctttgctctggtaattacaaagagagagaaataaagagtgtgttcattagctcaaggttagacctcaaaaagtataattcagtaagctattagtgattgagatcttttagcgtaccggatagtcggggttattgcagcttcggagacgctttgatccagctgcagccgcagcagcatcagactgcaagctctcattttccttgttacatattacaccttgccctagagactgcttgcgctttctggtgcgcactaacagcaaaccatcttcttctttatcggtcgccattgtgcagatgcccagatgagggagctgaaagcagcggcgaccgttcagttatgataaacttgcaataaacctctgactacattccagtatggcgtgctgatcttgtgttcattgcacctggagcacaagcacacttcttcccaaactttctaattacctatccatgaccaaccaagtttgttgccaaagtttcaggtcgatccgagccatattaataaaaaagaatttatgatgtgcacggaaaaatgttccctgttcgaggcgacgcctgttaaaaataaactctggctaaggctgaaagtgccggaacgccatgcaagacacccggtccagctataaaactgggtactgtactgtacgtaccgtaggtcggcaccgcattctgaggcaggacagggcggcattgctgcaacaacggcagctttacctaccatatttagttataatgggggtggtgcaaaatgggaatgagtactttcctacctcgatcatcaatgactccatacaaacttcttcataaagacttcgcccgtctccaaaatggctcgttttttggcaaccccattatacctaactaaacccccacaaaaactattgtgctttgcacgaactttggcatgcgattaagggctctaaaccaacgagcaaatccttcccggtgatcatatctcgcagcctaactctaagttaaagttaagctaatcaacaagcacaacgcagagcagggacggagcggtttccactgcaagaataaatcggttgtcgctgcaagaaaacaaactgataaggtccccgataaaatggcgccaactccttgcataatagtaagcaccgatttcggcggggacgttttctttcgctctcttcgtcgtgccttgcgcgttaaaccaagctcgaatttcagagcacggcatatagtagcagtataaaatttctactaagaaatgtttggtagtgcaggaaacgctgactttaaagctgcttgcagctcctcgatataaaaacagggatgttcttcaatattgtagacgtagtttagtacgatagatcgccaacgcatgttaatcgtcgactggaaaacaatcagacaaagcgagcgagttagaattagaatgtcagggccgtagtattgtcggatttactccagccattcaacgaaagtgagcataactcaacgttaactcgttgtcttattgccgtttgcagatattttggccaacgcatgcttattatttcgttaataatctcggttttaatccagtcagctcttaattaagacctaggtctgatttatatatctcgccagtacggtctaacatccaagcttgaggctctgttatcccgaccaaaacgcttttctgcggcttggaaacgcagaaatgccattctagacaggccaaaccgagtttctgggcctaaaagctcgtgcccactcgtattaagagacaggcgtggtctattttagaggtctattttagaggacaaagtatttgcaagcggcaatagcagctattcaatcttaaatcgacgagttagcctcctaactcaacgatgggctaatcaccgtgatttgctaaaacaacgaattacgtcgttgtttagacagaaagcatgcaaggcacaataaataaatacggtaccccccacaggaagggttccgcgatctgtcgctcaagcatcgtgtggttgccgtgcatttcaacaaaacggaaacaagtccgttaggtagctgctgtacactaatcaaaggtagactaactttgtgtaccattttccagtgctgccgtgaataacttggtggccaagttatatatgtagcgaatatcgtaagagtagacgacactcgaaagcacacatccacgcggcactggccctgttcaggcaaaactggaatctggaacctgagaaaaaaagctcaggctccagaatttgccgcgtgttcagcgttgcgagtgagcacatcgtaccatcgttctcagcattaattctgacagggggaggtcacagaagaaaactcgcgcagcgacaacgagcgccgctgcgacgacgacgttgctcactacggtaaggctatgtagatgcggccttcttgactcgctgcgtctctggtactggcccattagtattatatccgcacattacaggtgctggctgctgatgagtatggacaatcgagctcggctaacgttggcgctgatgctggatagaatgagagcccctgccaccacttcgccgctgcatacctttgcatggatacaacactggtatgagatggagatgcaggctgcgacggagcttttagcgtcaaatatacgcgagttggtcatggctgtcttctcgtccttagcaactccagccttgtacacatcacaccatgcagtagccagggccagcgtgtcctgctcagaccaattgcgcttaggaaagggggcagggtctgaaggctctgatgtgggcggctcggtcggcgaggcgcactcatgaagcgcgctgctgcttgtgttcattgcgtctgtgagagagaggagtgtctggagggagggagctcagctgcgaggagagactattcgtttgtagaagtcccagattccaggtactcttagagcacctggggaaatggcactaaagcggggttattcctggcatttttagtagccttttcccaggttacagggcaagatgtggtgacgctgaacacattttccctggaacctgggaaaatgtcacaaatttttgtcaggttccaggttacaagcgttgtctgaacagccccactgaatggtgctgccttttagcattgcattgtccactggcaggcagtctggacaatgtatccagacagcgcaatcagccggtgccaaacatagtatttcgcgtccgcccgagatcggatcgtatggcgggtgtgcgtgctggaaatcaaatgcgacagaccgagcataatcgtcgattcaaagcacacgaaacactgggaaaaactatggagctcgaggtaccaaaaaaataggcaaataggtacatggacctaaaattgaatcaccctaaattttggtcggtttgctgatctaagaaaatagtccagataattgccgctagatgtccatcggcaaataagtaccattttaattgtctttaaaaagtcagactgttgattataccacatacttagcccgtgtttatactggaagagtcgatctgcgttgtactcaacagcgtttaattagtcgaacggataattttcgtctttgatcctggcccgacaattttattaagattcaatctgttcaacttaatagatctacagttccgagttgtaagcgatgcctcatcctaatgatatcatcacttcaacggggagagggggtttctgttgcggcttcaaataatcagatacaagcagctttattgctatcccagaaatattatttgttagattaatgacaaggctgctgcgtaaacaagtaggtcgtgaagaaccaccttatcgttatttcctcagtaaagtgagtatgctgacgcgtatatgattgcaagcttggtttgcatgtagatcgcatcgaatttccattttcagccattgctacaagtcgagctggaactcgagcagtccaaaaatgcacctcggttcaaaatgaaagatccttacatgcttcacatgctttccttaacccgggtatgttccagcaggaatacatcgatgtgcagcaatgtatagccttactgtacaggtcggggacatttatttacaagtacctgctacaagattctgaaacactgctggcctccaattcgatgatcaaagaatctggaggaatatataatactgatagctttcggaggacaataaaggtggcgctagataacagtgagacattatgcacgccgaccttgctcagatctcacagcttagcgagaccaaggatggtgccaacgcctctgaatataaaaaaaatgcagatcgtggcagaaatgttcagattttttccacaccaattcgtcctcagacggtggtagtggctcagcatcgagctcgatgcgccctcaagtgggcccatcagcgacctcgagcttcctgcatatccatcgattgcaagttcagtacagtattgttttagcagccgtgccgcatcttgcaactttctagactaatttcaagatcagcaaatgaaacaattggcgggaacccgcaaatgataccgaccaaatcgcgaattatttatttaagttttggaccccatattggtagcgttggggcaagttaaaccatcaaacccaggtgctgtcgacgaaaacctacccgcaaatctgtcaccagtactgaataggcccgaataacgtaccttaccatgcccaagtccaccttacatgagcaggaggttagccatatgaccggaaagcactctaccgctgtaccaggcaagcgtttggattttcgtggagagacacaggacgagagcggagacgaattcaccttccgtttctcttccgagcttaagctacgttcaacgcaggtcgtagaccaactcttcaatacattcgatcatatatgggtaccggtagttttgggggaactggggtcccgatgggtacccgggttcccgccaattgtttcaaatgtgaaaatttagggtgattcaaattttgggttcacatacccaattgtctatttttggtacctcgagctccgtaacctcgagctccatagattttcccgaaacactgcaacaccaccaagtcgcttccctgttcgttcgttcttcaagcagccgaacacttggcggcaccccctgacgatttgcgtggcgggttgtggacacgcggactgggcgcgcacctcaagtcgacattcctcgactttctccaccgggttaactggacgtcgtctgtgcagtatcctccgacgttcgactgactatgagtctccgtcccaccgacgcagtcctaatgccccctccacccaagctcggctcgccccgaagagctcaaagctgtcccgaaccgggcgctactgactcgagagctcccaagaaacgtcgacggttgagtgaagtccccgagacgaatgaagagctcatccaggctctaaccggagctacatgtagtcgctcgcgtggacgaccccgtgacccgaccaaagcccctcttactgccacgcatgagcttcggatgctgagagctcaagtagcgaacatggaggaagaactcgaaggtttgaagtccaagtggtcgaaggagctgcccgaacaacgcactctgtcaacggcacgtcattcagctcgagagaaatacgcggctgacttgtctgagagagcgcacaacgaactccagcagctccttcgacagcagcaactcatgttcgctacgctgcagaccgccgtcctgcacgcccctcttcactccaacggcaacgacatgttcgaggcactgcacttcgacactcaacttgggagtgaccatcagcagcgcgagaaaatgctcacggcacacaacgagcggtctctcgctacgctgccgtctatcgtcgacaagttctcgcaaatggctatcgacaaggcgctacagggacaagatgccactaccactggcaagtccgtaatgccgctgtcgcagatcaacatcaccggcggccaggactgcacgctcatctcgagcgtcttcatctccgagatcccgcacacctcgctggaggacgtgtacgctgccgtgctggcgtacttcgccgcaatcccaacgtcgctgaagcgccacttcggagtcgatgcaaaccgcacgaggctgaacgacgcagagtctaaggtcgtgtatcggcgatcgaccttcaatggctcagggctgccagcgactgtgaacaacatcgtgtgctcagagctggcggcgtcatacggaatggtccacatcgacgctgtgacggacgaccctctgcaccctgtgcccgagtcgtcttcgtcgcagtacggcatctgcgggctcactatcacgcctcggaaggagcccgtgacgggcaaaacgtcgagtatcacgctgcgctgggtggtggtatatcgctacaacatgctgccacacgagcctgcggttcgggaggacttgacgatcattcgacccattctgaacggtgacctgctgacggcttcaatttgcaattatatccaggagcagcagacgcaccgccgaaaatcctcagagtaacttgctatatgtattgcctggtgaaccaactcgaactgtgtattcgagatattgttctgctaagcttatcagcttaaatttgtacgaagtacatgtaagggttttggccaattttagtagaattgaccagtttagtagaaccagtaatattgctgaaataatgaaatacgtgctttgattggctataaaaatcttaccacgcgtttccatatggtacttcgatacaaagaccagttttattccgctctacgaaactgatcgcagcatactgcaggtatgctttctttggcgcgctacaatacactttcatagctgctaactgtgtctggattggtgcacatgttagagcaaatctagggctttcattgtgtacaggtttcatctccaacagattggtagttttcaagaaaatacttttcaagtcaataattcagtttgctctactaaactggccaatccccttaggaagaacgagtttttcttaaaggtaaatagagaccattcggacttggtgtatgactggttacgcgttgttctctttcttagatgttatggcagtggttcgtgctggtgcaagagtacaagtgccgtgttacacacacggcccgtgtagccttcgggctctgtgtgtggtatagcaaaacctatttcatcgacaaaatatcataaggaagaaataagaaaaaaataaaattgatcgtcgagagactcgcccacatggcttgcatcatgcaagttgcatgtacttcgaaggttagcatggtctatccggatagtattttcttaattaaatctttagaaaagaaggacatgcgtcgacgtgaacgagctgcaaactgcaacaacttgcaccgagatcacgtacagtaccgctgatccgaggagaaggactttccttcctgcaaggaagacgttcggtccattttgcttggcgtaaaccgcaccaagttctacagagaaatacctaggtctactgtagaagtagtgtaatactgtaaatacatgtactgtacaagcaaagtggagtgtcaaggtaatcccctcttcgcttgggtttggacgcccgcattgaggcgaggaagaatgagaagctcgggtgcgatggtgaaaatggcaaacgcaaccaagtggtgatttgccgggttgtggactcgcatggcttgcagctcattcctcgatttcgcgctcgtaagacaatcgcactgtcttgttagcacgggcctggctggatgaacccgcggcccaccaaggtagctcgtatggcgcctcttcctgagaccagctcgcctggaagggcccgaagctgctccgaagaggagtcggacgctcgttcaccagcgcccacgtgtgtacgctcctccagcggagctctaccgacaccgacgcctcttccgcgactacagcctcccgacagagctcgcagttgtcccgaacctgtcgccccgccacataccgatagccgcaatgacagtcaactcgacaccatgcacgagattcgcatcctgaggacgatggttacgtccatggaggacgagcttcgagtcctacagtccaagtgggccagccagctccccgacaagcgaacgctggcctcggctcagcgctgcgcggtcgagaagcacgcggtcagccaagccgaggcaatacacagggagctccagcagctcttccgaaagcagcagattctgttcgccacgatgcaaaccgccgcgctgcgtctgccgctgcattcgagcggcacagacatgttcgaggagctgcacttcaacccccaactgggccgagatccgaacgaccggaagcggatgctgctgctccaccacgagcgctcacttgccacgatcccgtcaatcgtcaagaagttctcgcagctagcgattgacaaggcaaaggagccatctcaagatcaggacgtgttgccgttggctcaaatcgacatcactgggtgcaaggactgcacgttgatctctagcgttttcgtgtcggagatcgagcacacgtcgctggaggaggtgtacgacggtgtactggcgtacttcagcgcgatcccctcggtcgtcaagaaacacttcgggatcgacgcacagcgtgggaaactcgatgacgcgggactgggtatccactaccagcgctcgatgtttgagtcgcagcattcgtcctggatggtcaacaacattttctgctccgagctcacgcggactcatggcatggttcacattgacgtcgtgacggacgacccgttgcatcccattcccgctttcgcggcgtcgcactactgcgtctgtggcgtcctcatcacgcctcgaaaggatcctttgacgggggagattgtgtccgtgacgctgcgaagactcattgtgtatcgctacaacatgttgccgcacgaacctgcggttatggaggacgtgcagatcatccgaccgcttctgaatggcgatctgatcaacgcctgggtgtgcagctacatccagcagctccgacagcagcagcaacaaagctcccagtagcttattctaaacctttatcaacagagcagaacgcaattgaatttgatcagaatactttgttttacttaacttttttttaaaaaagaaagacggagttcggacaaagctacagtaaagactcgtcacttgtgcgaagtcggtctccaatgcgtacagtgtacagtgaatagataattgcgcgggggtcttcgactcaagccaacgggtcctgctccccgacgaggaacttgaagagttgccgcgggaggtccttctggcatggacacgcgtccgcctcgatgacggggcacgcagccacgagcaataggagggcgtcgatgaagcgctgcacggctttggtctgctggtgcttggagagcaccaacgtcagcacggagcctggcagcacggccccgagcagcagcgtgcgcgccacctcgctgcagaactggcagtccatagtggagtgcgacgccgtgcaggtctcgtacagctcgtcgcgcagcgtgacaaagtcggcgaactgcttctcgatgtgggcggcagggcgctggcccttggccgcggccttgagactcgtcgggatgcgcgtcgtggactgcaacggagtgaacacgtcgatgacgtagctgccgttcgtgggcgtcgccagcgcgcggcggatctgcttgagcttgaccacggtctgcatgtggcgcgagtaccgctcgggcatgaggttcgtgggcgacagtcgcgcgagtccgccgaccaccacgtgactgcttgaagtttgctgcaggacgctcgccatggtctcactatagtgtacagtggcgtctctgggggctggaggtgagcgcggtagcgaggaagctccaaagtgaagcagtcgagcttggcgcaaaggcggctaacttaccctgtagctggacttgtcgcgttgccgtcggcaggccaatcaccgccgcgttccggtccttcgcgaccttcaactgcaccgtctcgtagctgaatgcgcgcgagtgcaaggctgaatgcgaacggtccggtgctttgcaacgcgggattccgttttggtggagccaccaaagcatcttcgacccgacgttcgggtgagctattacagtagatgccaacctccatgacgtggtaatggcaatatgaaggaagagtgaagcttctccaccagccttatcgaagtaaacaagcttcgttttcgcttcaggtgcgggtttccagggtgggagacaaacagacaacgacggataaatccggcataactgaatgacatcctccatagtaaatgtgccagaattctctgtcgggaacgatagagattgtacaaggcaatgacataaagtacacgtaacgaagcataaagtacacacaaatttagagaaagtacttaaaaccatatggaatacaaatgtcaagtgtaactctcgaagctgattggctatctgaattacttattgtaaaaagtacaacatatgtgtgccgggttttgcgttgccgtatttatccgtcgttgtctgtagcgtgctcttcttgagggcgggagagcggtttttgtcacggaaacctcgcgcgagccgcgcgaagggggccccttccagggggtcaaccaagctcgtggatcggtggctgcgtacgggtaagtttagagcggcaagctgcaaggcgaactcactgtcacggtgcacttgctagtcgaggcgctgacttcttcagcaacaagttgaagtcggtcacgttcggtgattggtcgtccgacaaaaaacattgatggacacacccgtcgtgcagcttttatcaatcattttacgaaaccaattgaccgcggcttgttgaaaccctcagcacaccggcaaagatgatcctcctatcgctgttgaccgaggttgtgtggtcggacgagcaggcaaataagacgtccaagatccttggtagcaactccgaagagcatacgaaataggaaatcatagagcgaaatccgaacatcacgcaaaactgggtagaaccacagaccgcggtgaaatggggtctatccccttgaatattatcttcttcgcatcctacgcagcatcgccggggaaagattaacaagatgataagacgacatcacacggagtttccatcccaaaaatgcaccggcattttgaaaaatcccccagcttgaaaaacagcgagatctccttttctcttggagtgactccttttgggatcactccacctttactgcctcgaaagttgatcatagcgtagtcatccactggcacgaccccatattcaccgcccggagcgagttttgacgtactgccgtctatatcttcgtcccagtggacctcgagcccccaacgccgacgcccgttcacgtagagcgcatcggtgacttcactgcgatcaccaccactagctgacgaagagagaatgtgcggtaactccgggcagatcaaccacgaacgcatcgtattcagagcaagacccggtacaaactgtagcaagaaggtaactttatcggggaagccaccattttctgcagcagactcccgcagagctgatgcagacatgctcctgattgcgttcatgacgaggaacggcgaacaggtacttgctgtagtatcgagctgccaacacggacgaaaacctcacgtgcttcgttccaacttcgaggggaaccccaccccagctttcttcagcgttatcaagcacttgttgcgtttattcgacagctttttctccagcttcggcctcaacggcacaggagccggagccagaacaaaacattttatcaaaaactgtttgagtgagagactggctggctcaatgagtttgccatagcaccgcaacatgtggcccagggtatgaaaagataaacacactgtgatcaactcggcctccgatggcgaagcagtcctgccgaacgcgatcaccacctcgtcaataaaaactcgcaacgcactgataagtccgtcagcctcacgcaccaaaatctggatcaagttgggcttttgcatttgggcgggcaatccgatcgctggcatcgtcagaaacgtccgcgcttcgtcgtcactcaacaggaaatcgctccgtccgaatgtcatcattggcttcaacacctttgggctctccactccgtagtccagagtatgcgtcaccgatatgataaagcgaatattcggtggcagccacgtcgaagctgcgtcaaccaaagcttcccagtacagattgtcgtcgaacttcttctctgcgaagtcgatcatgatcacgtgctcttggtcggccctcagcgtggactcttgctggtagatgtcgacttctccttgccggcgcagaattgaattggcggagagatcgcgagcgaacgagaccgatacacagttcagatgtgagtagcgctgagcgaagagctgcagcagcgacgtcttccccgagccttcacgggatgacaagacgacgaaccggttgtgcggcgcctccaagcccgcgtagattctctccagcagctcctttcgctctagatgaggcacttcaagtctcaaaccgtcttggatgatctgcactagcggaaagggggccggcggatcaaactccactctaagaggctgcttttcggctactccaaggccatccactttcctcgagaaatcgagaggcctcttttcttcagccaaagccagagactcgtacactttcacttcatcgtggtacacgcggcccaaaatttgcggacaagcagtgaagagagcccctcgaaagtcaccaatgctgtgaacaccatcgactaggtcaacgaaatccgccgtcctacccggaaactggtaccacacgcgccgctccatcgtccaacgaacgttttgcttgctcgagaaccttcactttgcgaaaaatataaactgaaattttggagaaatcgattttcgaaattgtaaactttgcagtgatatttatgagctgttactttggcactgttcggctgttgagcccctgttcacccctattctgctgttggtttctgtttactttcttcatggatttctcctgagatgaatgtggactgtagattacactccctagaccccagcaataggaaatcttactccgaattgcgggaacaggcgcattcgcaggaatgctcggcaatggttccgcctctcgaaattccgcgcggccctaatttgcgaatacagtaccaggttttcttctgctacgtgcccttgcaatcgctcactaccttctgctacatgaacttacagcgctttggttttacttctgtactccattgattcttcagcggaaaagagcagtccatttgcaagttactagctatgggagtagccgatgtacctatggctgaagtgcttttgatgaggcgattttgaattatccaagagggagtatgcgcgcgaatcgcagcttgagcccgcaactggcatttaatctaaaatactacgtagtatctgttggaaaacaacagctgaccagggtccttgacaggtcaataggagctgtacggtaccaacagctcgacagtgctggaacaacaagtattaattatttctgacagatatcgactccatcctcgaagcacatctgcctctcctggatatagctacacacggacgcagtgatcaggtctccgttcaagattggccgaataacctgcaggttctctttgatgcgagggtcgtacggcaacatgttgtagcggtacacgaccaaccatcgcagcatgacagacagcgtctgccctgttagcggttccttgagaggcgtaattgtgagaccgcagacgctgtactgcgaagatgccgactcaatcacgggatgcaaggggtcgtccgtgacggcgtcaacgtgaaccatgccgtacgatgccgtcagctccgagcacatgatgttgttcaccgtcgcagacattttcgacccctcaaaagttgaccgacggtacaacaccggagagtttgcgctgttcagcctggtacgctcggcatgaacattgaaatggcgcttcatatagctcggaacatcgtcgaaatacgccagcacggcggaatacacttgctccagtgatgcgcacggaatctcgctgatgaacacgctcgacaccagcgtggagtcttcgcaaccagtgacgtcaagtcgagacagtggtgtcttcagtagattatcgctctcctcactctcttggtgcctgtgaatggccttctgcaagaatatatccacgatggacggcagcgtggtgatcgagcgtttatggtgctcgagcagcagcttctcgcgctcagctggatcacttccgaggcgggtaccgaaatgcagcgcctcaaacatttccttgccacttgaatcgaatggtgagtgatcgaccgcggtctggagggtggcaaacagcaattgctgttgctgaagtgactgcaggagatcctcgcgcaccttctcggcctgggacgtagcgtgtttctcgcgggcggactcctgagcggtggcaagtattcgaccgtcttgaagctggtcgcgccacttggattgcagcgcttgaagctcgtcttccatcgacgctgcctgcgctctcagcatacgaatttcatgcgtgaccgcgtttgaacccaggcgccgaggtcgaccagcacgagtcgactcttcattgatcttgagttcatccataggtggttttggcaaccgaatgagcttggttccaagctggtagatagggaagtgaagcgaagccctcgaaagtacccaagtacccctttcggtgtggcttgatggatcggatcagcatccgttgcgttacatctctcatcgatttgcctgccgtgatcatccaacccgccgatcaacagtatccacgctgagcgatatcttggtaccacttcggattggccactcactgcaacactcacagcagagtgtcatcgtgaacggccctttcgagttcatagttacatgcatggataggggagactgcgtgtacagtatcggatagctttcgcggcggaaaaccagaaatttttggaagtgctttcgaaattgttgagaacgcgaagctagcaaaacgccgtagttttgtattcccccgaaaatagagctgccaatgctgagctcttactttggactcttgagcaatagttgctgtgcatggtctggagtctagtctgagcggggcttactgtggaccgtcatgcagccagggtacgcccagctacgcggtagcgaggcggatgcaggcggggaagtggaggctgaagaggaagacaagcgacctgttgccggggatagcagctacgattcgttgtgggatgacgttgacggtagcaatgcactggaagagctgaagtcaccacgagaccacgacgcgcactctctcattgacgtgctgtccagccagctccagaaccgggagatcccgcagtatctggacgagttcgaggtcgtgatccccgacgctgaggtcgtggtcggatcggtgcctattgaggaggtgcagcagcgagagcagcaggtggaggaggcgaagctccgtcaggccgaactggagagcgccctctatcgtcagcgcgagattcatttggccaagcaagaagcgctggctcgtgagcgattgttgcaggaagctcgacgaagacatgctgagctggtgctgaaagaccgccaagctgctgaagccatgcagctacgcgcgcggagaattgggcacgtgttccagcaggctgagacccatttgaaggacactttgaagaaacaagaggcgcgggtcgagcagatttatgggtcgttgatgccctcgcgcgtcccgcagagtcgaaagaggtaccgagtggagtgggctcggataccgctggctatccgcgtgaggggcaggatgctgaacgccgtgaaagataagctgccgcatggtcagtacgttatggtggcgactttgtatgatcgtttgggcggtcatgcgctacactggacgaattgggacccagaagtatctccggcagcagagacaaccagtgatagtaatccatcgagtactcacaggggtcgtcctaacttcacgcggccattccatcaccgcggccgcttctacaatactgaagtcgtcgtgaaccaagacatgttcgtggtttgtccgccagaagtggagctgcgaccagggaacaccatcatctttgagcttttcctgctctctcagtcgaccgcagcggcttacgctggcaataatgtgatgtcgatgcctaaaaggaggcgacggggagggggtcagctcctaaatcaaactatggcgatgcagaccgaccacgtcgtagcctggggggccttaccactcacgacacccgagtttcaggtcgtgcaggggaagttcaagctgccactactgcgcggagaaatggatcacacgatggacaagtaccaagacatggaaaaaatgtaccggcacgacttgtcctcgtggctctgcaatttctacctccaagtgtaccatctccccaagcctcctgctgccttgctgcaccggtcacctcggaatcgaggcacagatgatgattactttgatgcggagattgatgagcgcggtggtctgctacgactaatgctgccagaggtggaaaacagtcaccaaaggtatatgcgtaagatgtcgacgcagccgagtgactctggtcagactattcggaagcggtcgcagtcttccgctcgtcaacggagtaatggcgagctaagtaccgatagaacactgctggagagtggcaaagaatctcatgtaaagggcaattccaagcatcatggcggtgcagcagtgaagccgtactcgtcagcgtcgacattgttggtggacgaggaggaggccacaactaccaagaaaaagagagccaagccgcccccgcgaattttgtcctcaacgcggtggcggtggaagcgatggctctctagcttcggtcaaaccaagaagactcgggtctacgtacgtggtgtttttttttctcctttacactgtcctcgacacttactaacatgatgaaattgacagtcaggcgacgcagtggcgatgcagcaaaaccgcagccatcctcataaaatgattccagttgaggaggaatctcaagaacaaaacgagcgtgaacaactgctatcagaccaaggcagcagccgaaagttgagtcttgacaggccgcaagtcgcagaacattttgccggtggcaatgaagatttgggagtcgtcgaagacgaggacgatgcggctttggttggacgacaccgacagctagacgtggagaattacacgttttcagtgaacgccgctgcttcgatggagaccgctcgccatcagcgattccacgcacgacggaaaatgcactacctgaagcacgagctgctggttgacctgggctttacgaactggcacacgctggaattctggcggctcgtagccatgttgatgtttgcctgctggatccggttgtacgtccactacttgacgcagtggctctttttgcgaggcaaccgtgtccctgtgtacgacttccagccacgctggacgacgtgcattgtcaagtatacttggcagactgtggccacgcacatcgaaattgggttgctctcgttgggggtgctaggaaacacgatgatgttcgttttcctatctggggctgcagctgtaggccagcgctacgtaggagacctaccagcgtttggctccaacttcgtcgcttgcgcagggattgctacagtactggatccgttcctggtgcttatagtcgacatgctttcgcaccactacggctgctcgcagcttagtgagtgtgctgtgtctttgacagcctctggctgtacctgcgtcaccggcgactggttcaagctctatgtgcgcttccaggctcaggaaggcagtggcctcgtcggtattttcattgtcctcatcctgtacgttgcgctcacgtgtctgtcgcttgtggggctgtacatctacctgctctacatccacatgaacggccggatgctcgacgtctaccgccgcgtccacggccacgaagactcgttcttcgtgcctcatgacgcagagatatcgctccaggagctgcagacagtgtgcgcgcaagccacacgctggaaaggtccgcgcggcacgcagcgcaaggtgttcgtccacgaatacgcactctcagacccgctggacccgctgttccgcgagaccaacacgcacattgccgtgtacaacgtcgagctcgacgggagtcgggaactgcaccgccacttcctcaagatgccggacggagcagttctagagctgttcggcgagctaggcgccagcactgatggcaactggaagagtgacgctccgcagggagctgcatcacttgcgttgctgcacaacatcctccaggacgtacagcgagacgacaactcctcttcgatgaccagtgcggcgatttttgaagggctgtaataaactcgcgtttcgacaggaacatgatgacacaacgcaaaactgcaactgcaacttgacacatggctacattttcggcctcttcccaccggtataccggtccatcaaaccggtatgtgtcaatattacccaatcagcgacgagttgacctcgccgcagttcctggcgcccacccacagcaataatggcgcgaggtgcgcgcggcgtgacgtgccgcgagtgcggctgcctcaacttcagctcggagcacgacgtgtgcgacacgtgccgctccaagtcgctggccttccgccccacggcgcggcgcgtggccggctccaccgcagcgcccaacggcggcgcctcaaacggtggcagacgccatgaggacgcgcactcgcactcgcactcgaagaagcggaagctcgaggacacgaagaatacctccaacaagaggcacgcggaagacaaacccaagcccgcgccgcccgccccagcagccaaagccaagacgcagcagccggacgtcatcgacctcatctcggacggcgacgacgacgaggacgacgtggtggtgcagaaggtcgtgcagcagagtctggagagccacaagcaggaggagtccgacaggtgcaagcaggaggaggagcggcgcaggaggcagctacaggaggagaagcgcgcgcccctgcagagccgcgtcatgccctcggtcacgttcgtggccagcgacttccccacgatggaagcgggcgcgttgatgaggaagcgcgcggccgagagggtccacgcgcagtcgcaaccgacggggggagcagcgacggcgacgacggcgaagaccgcgcagacttcggcgtcgcaaccgacgccagtagtggctagaaatgcgacggagaaggaggtacatccgaagcctgtggagccaagaccaccgtctgctgttgttgtggtggaggagaagaagaaggaggaggagggaaaggagaagacggaggagaagaagcagggacaggcgcagaagaaagatcacgttgaggatgctcggacggacccggcagcgacaaaaagtggtgtgcagagtgctacctcgtcggctttgagagagccgaatcaggtggaagaggaagaagctgagagcgaagaccaagacccgttcttccagtcccgggtgctggattccgtcgagttccaagcgtcagacttcgtcactgtgtttgatggattggcggtggcgcgacgaagtcaccctccgacttcacagtctgcggctgcaacagctcccaacgcagcagcttcaacgacgacgggatcggcggcagccgcgataccggcgagaactatggcaaacggcggaacccgaccggcccaagcctcaacagccgctaggccagtggtgccgtttacgaccgtaccaacatctttcagccccggcacgaggaacgccccggaggcaaaacctgccactgctcccgtcaacacgactccgcaatctgcagcgccgccggcccccgcagcgacgtcggtcacagcaacgcctgaaaaatctagtgctgcacccgcatctgcgactacaacaccagcgccaaaaccacctgcagcgtcgaagcaaacatcaactcaggcaccgtcgagttcagcgcaggctagctcagcgtcaagcaggacagcagcaacggcgacaactgtagcagggacgtcgaaagcagcggttccgtcagcagtaccgtcaccttctccaccaacatcggttccagcggcatcgaaaccttctgcatctgttgcggctacggtgaaaacgacagttacgacaacagcaacagcttctaacgcaacgtcatctacgccaactactaccagtattgctcccccgactcaagcatgttcagccccaacggcaaattcagggcaggctcaatcgaatgacagtgccaacgtgttgttaccgaagaaaaagcatccagacgcggttcaaagcgcggcagaaaagcagcagcactcggaatcaccagcaacaggaaatgaggcttcggctgatgctgacggggttgaatttgtcaaggtttctgcaccactgtttgaagttgttcgagatgttcctgttgagccccccgtgcttggatactgcagtccagattttttggcgtttatgcgtgagtgtggcggtgaagaggttgatgaagaggacgaccctgaagaagtgagcagatcacagttgaaactcctgaacatcgtggacttgacgaatctgagtgactcggaagacatggatagtgattctgaatccccagcgccaactccccgcgcaggtgcagctggcgtagcagggcagaatatgttacctactaatggccaagttggagggccaggccaacccacggccgctgcgactgcacttgtatccggaaagggaacgtggtacctcccgacactcgatagcgagcgtaaacgggcaaaaccggagaaggttatgtgtgagctgtgcgaggaaagtggcgtgccgtccaggttaatccgctgccctacgtgcacaaagtattatcacaagaagtgtgcgaaggagaacggagacgagaatatctgctggaactgtgagcttggctcgatgattgacgatagcgagctggatgcagaacacgacaagcacgacagtgaatatctagcgtatttaagagctatacgacgcgcttcatcgcctgctgatggcgaaggcgaggaagaagaggaggaagaagaagatgaagaggaggaggaggaagaagaggagggcggcgagaatcaacgggacggagacgaaggcgcaccaggcggtgaaaatggtgagggggcttctactggagagggtgacgcagaagggaatatcgctcagaagaacccaggtaagacgcggtggatcgagtttattggaggagccacagcggacatcgacgcatctttccacgaagttacgaaccgtatcgccgatgagcttcgtgacgaggagaagaagcagctgtactctcgcggtttcgtgtcacgggaggagtttgaggcgcagatgacggaggtggaggagtactacatcacggaggaagctcggttgcaacaactggagcgcgaaaaagcaatcgaagctaagaaggcggcagaagctagaaaagctcaagccgcggcagaacaggctgcagcaagcgccgcacccagcggcgtcgtgccggctgtcactaatgctagtgcgactgttccagtaccagcaccaactgcagcagtccagactagcaccaccaatgctacgtctacggcaagcgctgctatgtcttcgtctgtcaacgcggcttcttctacgtcgacgataaccgccgcggtgagcgtcggtacacccagcaacgcacccacagctccaggaacaacctcggcggcaccgtcagcactaccagtagcgcagccagcagcccctccagccactcaaggcccagcatccgttgcgtcattcatggcagcaccgaccgtagcatttgccgccgcgttcaaggccgcgtttacgcgacaagcggccgctggcgcaccgcctcgacccccgcagccttaatggcagagttattagtcgtcgagttagtcgtcgagtcaacattaaatctatgtcgtgggtatcgagcaccttccgactcggaatccgagatgcaagacgtgtgcaatgcaacttcaacgaagccacttaccacgtcggtacactgtaccacatgtcactctaatgaggtacaagtcactcttctaccagtcgtcctcaaagcgcgccaaacgaacaaagcgagccggagccaagccgggagcctctcaacgggaagcgctcggtgtccgcgtcgcgcctccagcccctccatcccgctcatctacaggcagcatggtggaggtgcgtctcagctccgtttccagccctcgcgcgctccttaatgcgctctagaacgcgagttatgagtcgctagagcgtccctagatcttaaaactgaccttttgcctgtaatttccccctctcaaacagcagaagaagggcgccaagcaggcctcgatctccgccttcttctcacccaagaaggcgggcgagaacgacgtggaagccgagatcaagagcttcgcagccaagcggccgcgagtcgcgtcgcctgctgctaaaacggaggccgaagcggccaactccacggaggaaggagctaaaaaggaggagagtggcaagcccaagaggaagtacaagcccagagctaaaacgcctgctaaagccaaggccaaggggaagaccaaggcgtcgcccaaacccaagaagaagaagaaccaagcgcgcttcatttctccgcacgctgtggttgatgacgaagaggacgaggacgatctcgatgacgacgaggacgtgttcaacacgcccgaggcaaagcgggctcgtgccgagcttgaggccggcggggagacggtccctgctggagcccccatctcgggcgatgccatcgtcaacgaggaggacattgtggatgtttgtgaagctgacgatgcagccgcaaaagaaaaagaagaaaaagagcaagaaaaggagaatggagacattgaggcagcagttgaggagagtgctgcgactgaagaggctgtcgttgatctgaccgcagcgtctacgtcggccgatgaagcggcggataaatctgctgcggaaaatggaaagagcgaaaaggaacaggttaaggcggtgatggcggtcaagtcgcccgcgtcacgaggaaggccagctaagacgccaaccaagcggcagcaaaagatgaaagaaaaggctgctgctgcagaggcgaaggctgctcctgtggagccgttggatccgaagactcaggcgcgcgtggacacatataagctgaagaccgaggagctaacaaagcagttcacggagttgttgaactcgaagcaggacagtgatgcagtcatgcaggatattctcggtgctgcgttagattgcggcttggacgtcactgtcgaccaggacaaagcaaggcaatcgttagcggagacgtggcaaaaactgcgtgaccacgccaactccagcagtaatgcttcagacgcagtcgtgtttgaattcccccatgaagtgaagtgtttaatcgtcaagggcattcaaggtcggacatcgagtctctctgtggtgtcagatgagcttttggcttcattcaaaaaggagatcgaagcggatgacgtagatatggaggcggactcgtcttcgcagaacactggcagctcagattctgtagcaattgagagggcagcatctcttgcgatggaaatggagattaagaaactggcggaacgcgtattatacggcgtgcgtcccgcaaaggctaacatattcgaagacacaagcgcagacgcattgtgggtctgggaggttggcaacccggagaagtttttcgtggacgacgcacagaagactatcaaacgcatgcgtaagaatcgcaagcgtcttggccagcagttaagatctctggcgaaggttgtgcaacttctgcatcagaagccagtagatgaagccaaggtgagcgccgaggaggcgaaggttggaaaatttgggtttgctgtggacgctgaggttcaaaaggtcaaggaccgggaaatgaaggagctggagaagcttcaagcagcggaggagaagaaacgacatgagctggaacgcaaactggctaaagatgaagagaagaagaagcgcgaacgtgaagaagaggagaagaaggcggagtcatccaagcggcaaaaacagttcgcgtcattctttgtcaagcccagctcgggatcagattctgctgcagcgaatggcgctggtactagcgcttccgctattgatgtgactagtgaccaggatgcagaaagcattagcgggccatatgaaagcagaagtgcgaagattaatcgcatggatgcggccttcagtttcttgggctctggtgaggacgcggcatctggagcgactagcggatctccacagtcaatcttctcgtcgtttaaggacaggcggagtacaaccaataacgaagtagtccagcgttctccagaaggatggagtgctcagcgtttccgtgacccgacacttggcgccatgaagctgctgcagttctacgagaacgtccgaccagcttattatggcacctacagcacgcgaagccgcatcttccgcggcggacggaggccgctagcacagtatgcgaagtttgaatactccgtggacagtgatgatgaatgggaagaggaggagcccggtgagagtttgtccgatgccgacgacgacgctgacgagtcagatgaggacaatctggactatgaagaccagtggctggcttatgaggatgaggttgactacatggacgacgcgccggcagacgatgatgagccgatggatcgcggcgagcgaccttcatcgccaacgaagcacaaactgccctcgcagcttcagaagaaacgggtgaaggctaaagctgtcaagccggcgaagctggagcctcagatcgttggtccgttctggtgtaatcagagcagctcggccccctgtgccgaagatcactttgccggacttgctggcgagctgttgtgcgagcctcaattcgagtcgaccttgatgcgaaaggcccgcgagtatgaagaggagcagatgcgactggaagcgttgcgacaagagcagcagcgcaagaaggaacagcagcaagaagaggagaaaaagaaggccgatgagaagaaggcacaggaggccaaggagaaggccgcagccgcacccgcagccgcttcaactacggatccagccaagcctgctgtcaccgcaaagacagcgcaaccgacagagaagaccaagcctccgaaggcgaagtcgcagaaggccacaccccaaaaggcgaagacaccgacgaagcagtcacctgtacctgcgagcacaaccccggccaaggcgacgccggcggccgtggtggccgcgactccgtccccagcgaagtcggtgaaacccatagattcttttttcaagaaagtggagggtcctgtgccagttccaccgcagcaaccaccacagccgcagcagcctcagcagcaggacgagcagaagaagcccaaggacggcagcgttgaggtgatttcggtggattagctggatccgcggtatcgatatccgacgcccaccagtatacgacacaaacacgatgatctttgaaagttacgaatataactcaacaattcactgctggtagtgatgctctatcgatcgggcatgctcaatgcgcacgcgttgtggtggtgcagcctgacctgtaccagtttgggggtacaaggtgccctttttgccgacttttcgcacgtgtctttgtggaacaaatcccatggtttgcgcttttctaatgcgtttctaaatgaaaagacccaaatactgccgatattacatcacagcgttccttgccaatgcaacgcggtcggacagatcgcaaaagcatacaatgcatacacaaagtcatcgtcatcttggcattggatgccgtggttattgcgatgcaaaccttacgtcaaaggtatcagatgttgcccatttaccgaccctagtgtactccgcaaacatgttagtgaatttcacaatacactaactcaccgtaagtgctgtttgcaaacacgtttgtatgtttgcactctatcactcgcgtttaatttagtggttcctaaagagaattggtaccggttgtcgaatttatagtccgcgaatacgcaccacgatgttgccagagtaattcgtataaggatattattattggtgtagagaagaagaacttctcggtgggtgctactaaattgtgatatttgtgaattaggaaaaatgccacatccggcatcgccaccttggaggagaccagaagaaggcacaatatgatgtatctggggaagtaacacatcgaaccacttatgcggacgttagcaagctaatagataatccaagtgccatatagaaggaaaaaaaaagaagttcacgttatttgtgctcgtgaatggcgtcccaacaagtaacgtctttagagtggagtgagtagttgcaagttgacgcagcgcacgagttcaaatgaagtctttatgagctcacagtccgagtacactactcattactcaaagttctgcgaaatgtactcaaaagtaaggacgtcggaccgtgaatttgcgcattttgggctcgcttttcatctgtcgctgtgcccaatttccaccaattctggcggttgtgaacgcatttctatttctatacgcctgtgttaaaaacacgcgcatagaaatagaaaccccctcctttcgatctccaccgctcaatcaatgggcccgccctcagttcgctttccccgcccaagccgccgccagccaaccccgaccgaatcagcatgagcctcgtgacgcgcgtgttcgcccccctccgccccgcggcccgcctggccgcgcgcagcttcgcctccacgggcggcatcccagacgacctcgagcacgccgtgggccgcgagcgccaggagctggaggccgccgagatcggcgtgacgcagttcaaccgcgacccgctcgagacggaggagacgcagggcaactcgaaggacgacccgatcctcgtgccgtccttcaacgacgtgcgcaccgtcggcgtcgcgcacaacgacgcgtcgtacgtctactggttcaacatggagaagggcaaggtgcactacctgccgcagatcgagaagtactttatgctgtacaacccggaggaactcgccaagctcgtcaaggaggtggaggccaagcagcagtaaaccgccttttcattgttggcagataaacccccaaggtggaaggaagccccaggatggatctgacgtccggactcccctctcttcccactcgctgtcgcgtcgactccctcgcctcccctggccctccgcccctttcaagcgagactattagtcgctttgagagagaaagagacagagcagaagaacgatgaagatgccgatgaagaggaaggaagagagaggcaaaactcttgtgtgacaaatgaaaaccccacagaaaaatgataactatttcgcctccatcattcgttcgacgtggcgactacgcacactccttgcacttcgtctccgttctggtggtgaggcacgtgctagctttgagccgctgtctgctctgcctgtagggccgctggctgttgagcgcgcgaaggggtgccatcgttgccgagtcacagtttgacgcgcgcaaggatacgcagcgtcgacgacggccacaggtttgttcggctttgttctggggaggacggcgggccattctgctgtgctcaatcctgctggagcacaggccgacgccagtcctcgcgatgagctcccaaggtgatgttcgtctattttcctccctgctccgctcctacgactagtcaaaatcaagatcctacgtccaagtgctgctgcgctgcactcggagctgttaacgagtgagaccgagagctcgggccaagaaacccgcgcgccctaatacgcccacgtcgctcaagcaaaaatgtcctaaagcgcagacacgtcgtattccgacgtgtctgcggtggggaagcctgctcacggcgcaacctgttgctgctgaagtggcccctgctgggagaagtactggaaagaggccggcgctgtcccttgctgcgcgaatggctgcggctggaacgctgctggtgctgcttcctccaccttgatcgtcgtcgtgcgcgatggcaaaggcggcagtgttgcagctccggcattcgagccatgaggtcccgcgaccggctccacctgcgggcttccgttcaagatcatggccatggcctctccgtgcttcgttggcggttgggcctcttccgagttccaagatccattgctcgcgcagtcgtcgctcgctggggtcatcgccgtgttgctcgacgccacgctcgtcgtcggactcagcatggaagtcgcaggcttctcactggacgagtactgcgtctgcaccggggccgggtgatggtccttcagcactccatccgtgtcgaacgggaagcgcccagcaaatttcaataaatacttctgggcgtgggtacgcgtctgcactgcactacgcgtcatgaccacctgggccacgcgacgccagtccttcccgtacaggcggatgccctcgaggaaggcggcgtgctcttcgctggtccatcgtccgcccttcgacggaccagtggtggaagtgctcgaagtcggtgctgggtgtggagtactgaccgccaagttctccatcttgacggtaggtgttacggggtagccctgcgaggtggcgtgggcctcatcacccggtcgtggagtcagcttgggagctgaagacgcatggtgagacgaagcgcgatggctggaggactcgccgtgtaccaaagatggcggtgacgtcttgggacgcatggagctgtccttgttcgggtccgcaatgacggactcgcgcttcatcttcaagttcacgatctggtcccgatacttctcgcgttcgctgccgtgtgcactgagcatggcggcctccatggacgcaatgctcttggacagcgaccggatctgacggtgcggccagcgcttgatgccgttgcgacggcagatcttcttcatgagcgtgatgcagatgccaaagtccttggccacgtcgatgatcggccggtcgaagtgggcgcgcagctcctcgatggagatatgcttggtgacgagactcttgacgcggttgctctcattcctgaagcaatggctgaagccggcgtcgtccgtgaagtcgagcttgctgcccttggggccgtcgaagttgatctgctgcacgcggtgcacctttcctactccgccgatagcggtgaagtggcggcggtgctcggagtcttcgtcatcgtccgacaactcgcccatgtcatcatcgtggtccgaatccggagagcctgccaccggggcggcaacaccactgccactgccactgccaccaccggagaagcccttgctcagactcgtgaggatcatggccgtctcctccgggttcagccccggagcttcaacgtccgacttggtctcctcggcctgcacgccgcacgcgccggcggtcagcggcggcgcaacttgctcaccggtcgccgcgcggccctcggcgtcgcatgccatacccatgctgccgctgctccagcttgcctggcttggtcctcaatcgctgcaacaagggagaatgctggtaggacgctgcctcgtcgcaggtcggtcggcgatatgcttcaggtctgctacagacagcccagcgagcatgttagcgcacgtgcgtgtagcggcatctttggtgtggcagctgtgtgccccagacgctgggcgcgtcaccctgaagctaaaaatagctcttgggcctgaaggggcacagacctctccaagctataaatagcgacttgtcgggggtgcaagccgtacctggttggatgaaagtggcttgatacgcttgggcgcaggcgagcgctgcgctgtcttcggggcttggagttgctgcgcgcggcggcgtccgatgctaccaagcgctctgcgactctgtggcctttggagcacccaccagtggatcgacacgaggttcgaatcgtcaacgcgcagcgggagggggagggggaagcaagtaacgcttaagtaagggaattcgcacttgcattgactatgccgaagccgatcgtcgattgtgattggacgtctttggcgggaattctgtttggacgtgcacgctcaagtggtgtacgacacgctaacgctactttctcgaacgcggctcgagtgccataaaacgaacaattcagttgaagagctgctttcaagctgctgcgatcacggtaacaccgcttcatgacactcgagggcaattgttactcatgaacccgaacatgaaactcaatgacgtggccaccattcgcactaatgttgtgtgcgtgtacgcactcacttgccgctgaagttaccctttcatcgtgttaactcgtgctaatcagatccccagttctttattcgactaaccaagtgcacttcctacatgtactcgtattaacccttagttgtattgtgctttgcagaagttttgccggtccgatttagtggttagatcgatctagcaacacaaacaaagtgaggtcataaaaatgcgagtcatcacaaatcctgcactaaatcggtcgcctactgggccaatgtcctgctcgatttattagcctcatatctgccacccgatcagcaacggatacaccaacaacaacgcgtgtgtcggcgcctactgcttcactaatactgctctgtttgctgcgtgcgattaggcagctacttgccgatttagagtctctgtagaagatccagaatgggcgtgcctcgcgctggtgtcttgccacaagattctcagctccgcggtgtggtaatgttccgaaccggcgagagctccagaggcccccgtaagggcattcgaaagagccttacgtttgttgttgcagagggttcgacgtcgcccgggctaaaatctttcgactgttgactggagcggagtttgggcccaatcctagtgcaatcgaggctaccaaaaatgcacggcagaaggacttcaagattctctccgttagcaatttcgaggagctgttgaagcgtcgatgggcgtgcattaccgatgatgacatcgtggctctggcatccaacgaggagccaattcatacgcaatttgtgtttgaatttttcgtctatctcgccccggtggtaaggcctattgatgggattcgtcgggccacggcggatcgagttcgtgccgcggcagcggagatcgtgactttacaggcagaaggtagagagcagttcggaccaattgccacccaccatttagctatccaccgcgcccgccaacctgaaggcactccgtttgcgattcctgaggacaatacgatgcaacaagcaagagctctagatgcagcggtagcagcgttggaggatactgctgccgaaccggaggaagatgtcgtggaaattgaagtcgagctctttggcacgtgggtgaagatgcgcgtgaagcgctcgaccctacgagaagcggtgggcctcccccaacacgacatctttaccagagggattttccacggttttcgccccgaagccatgatgccacaaggtgaagacgtcccggatgaagaccaccaaatgtctgaaaactaaacagaggtagttcttgctaggtaatacagaagcttcaacgttcattaaactagtgttcatcgtcactattagtttcgtgctggggttgtacaataaactcggaagatcggagtttcttgtcatcgtagcaacagtgctcatatagatttagtacgcccttccgtttgtttgggtggtgacttcgacagcaggaacgcatcgtcacatccagcaccaaagctgggtacagcggaaagatgagatttgccttcttctggatccagcgcttgagtagtccaaaacaaacctcgattgggtttaattgaggtgagtacggcggaaggtagagcagcctcgctccagcttggtggatggcctgaaaaaaataaacataaaatatctttgtcagcttaaaaaaatgttaaagctttcaaactgacttaccgattctagctctcgatacatgtgaatttttgcgttgtccattacaactattgaacgtggcagcggccaggggttcagaagaggtaagattttccaacaaacgctttgtgaaaggagtttctggtgtaagtaccctcagtatagtcccaagcgacaaatccactatggtccaaagctgccaaaatagacaaccgcttaccgcgacttaaaggtaaccgtaccaccgcctttgtattcttttttgaccacgcgtatcgccgataggcgtgacgcccatcttttgcggtttcgttaataaagagcaattgctctgggtaagaatacatagcctctaacttcaccttgtacgcatgcacttcgtgcggcacccactctcttgccgctttggttagcacctttctagtcaagttcatatcaaaatataaagctctacaaatggtactcagtgaaacatttttcaccatagggaaggtgcgcttcataaagtcctgtagctcctctaaatagaatgtgggatggcgctcaacatacttccgcacacgctccactacgtcacacgaccaccgtgactgtgacggggtcacacagcacaatgcacagaggaagtgcgtgcagatattactatccaggtgaacagcagttcaccagttcccggcctcaaagggaacagtttgctacaaaggagtaggttataagactgactgtattttggtagaggttaacttggtcgtaatacaaattacaagttaactatacaaaagcccacgcaaactcaaatggttggcttgcggagctactggtaccatataccatgtactcgggagagtgacacccgtcactcttcatgtaatgggtacacttgattgtaccccattacatcctcccccacttatctgagaatcacatctgattctccaatcagcttcgagagaatccgaacacccaaaggtcgcgctgccgccgcaaggcaggcgcgcctcatcgtcacgcccacagtgacttgtgcccgcagcgggcaccccgtgcggaaccccccctgccctcggcgatgttggccgcgaagccgacgcgtttagtggccgtattcacagcgctagcaggcgcagagtgcctcggcacgggatgcatgtggctccaaacttgcggtgtccctcttagacaaccagcagttggcgccgcatggccctcgggccccgctggcacgttcgtgctgcagtgcctcccgcgagggacagcacctttccggtcagcgcgtagcgtaaccatggagagagctgtgctgctcatctccggccatgacagcggcccgacagggccccgctcgtcacagcacggtgtgccggtcggccgaatacccatgggctatggtcaagcgctgaccacagccatgaagcgtcatgcttcaacgtcgtgtttgcttgagcgaccatggctgcttccagcaacccgctcatcatacagagcaacgcggcggacttgtctaaagccctgcagcgcgtcacggccatcacgtcgccgacgctaaggtgtcttccttcgacaccagggtaccgcaagggtacttcatcgtggtgtggggtgtattgccctccgtcaccagcgatcgcatcctgcgtcgcgacgaccaacaccaggtcggtgtgcgtgcaagaccgcatggcacacagtccatacaggacctcaaggtgtacgagggcaccacctcttacaccaaaggcacgtcgtgtatggcacgtaccacgacagccataagtgcctcgtgcacctcaagtgccacgtgcacaagtagtgtcgcgtgcactaggggtacctcgcgtacaccaagtgccacgcgcacagtgagcgtcacgcaccgcgactatctcacaggtagtatgtgccacgtgcacgcgtatggcttcgcgccttacaggtgcggcatgtgccgcgccaactgtgaatgtctgcaaaggcaacacgttcgggttcttccctcgtggacaacacccatgcttgggactgatagctacctggccggcagacgtaccgcgtccagtgttgcaacagcatcacgctgcggcatggtgttgcttatgtacacatgccatcgtccgcggaccaagccgcagactggctgccatgtctttgcctgacagaggcagccttccagcagcgaatgcgcgcgccatcttcggcccagcagcgacagtagccgctgccaaggttgctggccatcggtcaccatgaccatgggacctgagcagcgatgcatcaggtccagcaccttcgtgcaatacttcgtgagtggctacaccatgcagccactacactggcttctacgacgaagcaagtctcatgccagatacctcgggaggaagggaacttccgatcccctcccccacttacgatttgagccccggcgggtcaggcgccagccggccgcttaacctcgcgccgccctgcagcaccgagtcaccgtgccagccagcagactccggtggcacgggcagctacccttctttggctctgggtcaacatcgtcgacaagggcttggcatctaccagcctggatgcagtttgagtctgcgtgacttgacgtgttactctgttacccacgtcttcgggcaatgacacccatgacagcgtacggcttgtcctacattcagagtagctgcatggcatgcacgcatactcagactcagccatctcggcaccgagtcatggacacttgttgttccaacgccgcacagtgctaggcacgacagaccataccaacgatccctgccgtgcagcggcctttgccttcagaccgagcatgctcctgcatatggtcattgaggtgtcgccctccggcagacacgttccagtcgtgatcgaccatgctagccgagtcggcggcgacgcaacatgcatcgccgcaggtacgtcgtgtacccaagccacgtcttctgtgcgcatggccacagctgcgctggtcgacacccagtcgaacgtcatccatgatgaccgggtgccaagcccttggaggaaggaagtgcttccgcgcactcctcccccgctaaaatcaaagccgtgcggcgcctccaagaggaccgtgcggctatgacatcgtgacggtgtcacgagcctcttaaactccgtgtggtcatccaccacacgcgaggagacccaagtgacctgatcactagtcttggtaatactgaccgtgcgtggaactaagttacccacgctgacgtcgcttcgagcgactccttccggctcatgcggagccttacggcatcgtgtggaactacgttacccacacaagaagcgcatcatgcggcttcagaatccgttaccgtctgagtgacgcgtggggaactatgttacccacacaggaagtgcatcgtgcaccttcctcatcagtttaggtctgggtgacctggtgtggaactgggttacccacacaggaagtgcctgcagcgccttcctcttcagttatggtctgggcgaccgggtgtggtacttggttacccacgccggaggtgccttgagcggcctcctcagcattacatgctctgtgcggaactaagttacccgctagtcagtggtccttggttacctacctggtggtgtcatcgaacatcacccttgtcaatgctcatgcccagcaatgactctcagcactggagttgcttgttgaggcagctccacatgccaggcaaaaccgccctcggttgcagatacactgcaccttcttcatggagatcagcatgtcaatgatgcctcccttcttcttcttcgtcttgtcggacgcatccagcgccctggcggtcccatcggacgcccttatgtctgtccagaggtgggaacatgactcaccaatgctctgtcagacacagagggccggcttagcctcaaggcgttgccgcgctactcgaccgagagcctgtgcagcttgcacggcgcactcaggaccaagtcatacttgctcaagccgaggacatatacggttccatgcccaggaccggcttcggcacgatgtccgggacgatgtacggttccattgctgtcagtgccctcgagcgcggcagccagggtcacagcggaccccaaggttcttcttcggcccagcctcagtcaatgagacctgaccttgtgcttagactctctcgcagagtctcggcacttgtgtcgttattccaaccgacacatctggcgacgtgcgaacatccacgcgacgtcccagactcagtcatgtctagggataccattacccccgcacactcacgtgtactaccgacaacccaccgttgtccttcaccaatgcgagcgtcagtgctcgcaagggaccccgggtctctgtggtgtacgccttccgtacacccatcacaaagactcgggccaaccccagcaaggccctcgtccttactggtggttgtgtcccccttgagcacctgacggtgcatggcgtcggcgcccccttgaccctctggtcttcgggtaggtcttcttcccagacccagacgatgggcagacacgttgatagtgtcctagcccgccgcagccgtagcagcgggttgagtactgctcagtcgaactcagatccatgggttctggttcgctgtcagcgaccacaggctgtacaacagcaagagcaccagcctacttgtggctgtactcttcctggagggcgacttggatcgcctcctccatagtggcggtgcgcacgcggaacaactgcgtgcgcgcaggaccgaccttcaggccgtccacgaagactgtcatcttgacgtcttccgacagtgggttcccctccagcgaggttgccaacgtgcacatctcctgtacgtacgcgtacagctcgcgctccccttgtttgcaggcaaggaagcgcgagcgctggcggaactcgttgttcgccgggagaaaagcggctcgaagctgctcacacagctgagcccagggtgtgaaacatccaggcgacatcgcttcgcgcatatacgcccaagtcctggcacgtccgccaagattggagagcgcgaaggcgactcgaaggttctcggccgagatgagacctgcgcacattgcgatctcggtctcccggatccagaagtgaaggttctcaccttccttcccttcgaacggaggcacagctagccgcagaggcttacgctgcacccatttgggctcactcatctgagccagcaggtttccctgcacatgagcgatgagcccgcgttcgtactcgtcaaacgcgctcacccgctcgacctgctcggctggcgtcgccgccaagccccggagggcatctcttccgaagatgcccgccatcttccgcaccgactcgaactgcgagtcagtcaagtgaggaaactcacttcggtccatcgtggctcacagacctgagccaccgaggattcaggtagaccaatctacccgcgtaggcgtaggattgactacaagtgctaccaagtgtgacggggtcacacagcacaatgcacagaggaagtgcgtgcggcagttcaccagttcccggcctcaaatggaacggtttgctacaaaggagtaggttataagactgactgtattttggtagaggttaacttggtcgtaatacaaactacaagttaactatacaaaagcccacgcaaactcaaatggttggcttgcggagctactggtaccatgtaccatgtactcgggagagtgacacccgtcactcttcatgtaatgggtacacttgattgtaccccgttacagtgacgagcgggtggttcggacgtcatcttctaccactcccttagataagaacaaagaataccatctctgtatagttctcacactaggtccaaatatatcacttacgtactggagggagatgccatacacatgaacaagaaagacagcgcgatttaactcagtctcgtacttaagcaattcgagcatggttataagtcaaaacgacaaaacgcttgtaaagcacaatagatcgaccagcaacactccttatagtgaacatgcacgtagagctaggatactacagaggtttgtgctgtctacaacagatagactccttacgctccctcttacactttagttggatgatgtcatgggcgctgagttgtgagtagactgcgaccccaacttacacgactgtggtgacaatcggtatagatcatgagaggtggtgtgtgcagcttctgtttacgattttgcaagattctccgccaagtatgaccctgagactccgtgatcgaacgctattctgcttgtagacatgcaattggtcgtcaacttccaaccctatcgcccagaacagcacatgtgcgcggtcattcgccccctcacaaacaccaagagacaacaactcccggtcttcgcgttgcatgacactcatgacgctgtcacgattgatttttgaatcgaaagaacagctttgacgaggaagaaaaacaagatgaggcttatcgataaacgctgttgggtcccgataacgtggtcgtgcaagtgcccccataacttgacaggaaggtgcgagtcttcaacaacgacacacctttgacggaaaagcttcggagaatggcgcttggatgaagtcgcaaacttctttgcactggtgatttcttgaaatgccagagtttaacagcttgcggaattatcgattcgggtgctctcataacgaggatcctcaccagaagcagccgcggtgcgatgcatgtaagcgtgagagttttacgacacgagtctagcgtgattgattgcgctgtccaaccatcaacattgtcgttcggtggcggcagatctgatgaaatgccacgccaacaccagaaacgctattcttgtcgaacagcgttttcgagtgcatctacagcaaacagtgacgagatctcctccacacgaacgcttcagttgcctcgctccacagtaaactcctccgtcgactcgaccggttgtcgctgcttgctcaaatccatgactcatcagtgtgcgcagctcttctcaacaatctcctccaccacccgttccttactcaattgatgtcgtgcactggcgttatctctcatctttctctccactccagtgcttcacttcaaccagtttgcttcgtcactccgacaagaaccaatctccaatcctcgcctgaatccgcgaccgatctactaaacaatcatttcaaacgaggagttcgcccgccagccccacaaacgcgttatctagggtagaggtcagttcatgcatacggagagcacccagcgcgtgcgctgcgcacagccttccacgagcgctgagacctgcgctcaatacgaaatcagatgactccggtggctgtgctgcaagagctacgttcgacgatctttgaagcggagcccttcgctcccaagcgtcattcctgaagtctcggcgccgcacacagatcacgtctccaagtcggatcaatgcgcgcttcggtcggtctcgcctgcttcctcttgggcctagcggcggcttgggaccagcagcccgacggctacgaagtcatcgacggccccgctagccccgaggctctggacgaatggcgtcgcgactggaccacctggaagaagatggagctggccaccaaccgctacaacccgagcgacgcctgcaacgtgtacaacatcaaggagacgcagtggacgcagcagaacttcgtgcaggtctttctcatgatgaacgaccgcgacatctacgaccgcgagacgcagcagtacacggtggacaagtacgtggacggcatgcagaagcgcgtgggcaccgtcgacagcgtcttgatctggccggcgtacccgaacattggcgtggacaaccgcaaccaatgggacctgcttcgggatctacctgggggcgtggatggagtcaagggggtcatcgccgacttccaccgtcgaggcatcaaggtcatcatcccgtacaacccctgggacgccggcacacgcgacgaagaggggctcgagaccatggtgcgcatgtacaatgccgacattaccacgttgagtgagacgatcccggagctgcaagcggacggcttcaatggcgacaccatgtacggcgtgcccaagtccttctacaactgcagccagccgctggtcgcggcccccgagggtggcgtgcccaccgcgtacttgagccacaacccgatgagctggggctactactacggcttctcgcacttcccgcccgtggctcgctccaagttcctcgactcgaggcacatggtgcaggtctgcgcgcgttggtcgctggacaggacgaacgagctgctcatgtcgttcttcaacggcgccggctacgtggtctgggagaacgtctggggcatctggaacgccatgaccgagcgtgaagatgagaccgtcaagcggatgttcgccatcttgcgcaagttcggagccattgtcgctactggagactggactccgtactacgccatgacctccgacggactgtacgctagcgtgtttgcgtccaagaagagcggccaagcgctctacaccttcatcagcaccgcggagaacgccacgacctacaaactctcgctcactgcagcgcagtcgggagacgatgtgcgcgtgttcgacgtttaccacggagtggagctccagaagaaggctgggggcaacggatccgttgttcaggtggagctggagccgcgcgcgttcggcgccatctacgtcaccaagtctagcgacgacctggcggagtttctcggccaaatgaagacgatgacggccaagccgctggcgaaatactccacgacgaggaacttgctccagcagcaactcgttcgcagcaacagtaccaatactaccgtgacctcaggaaccgagacaaataccgacgacatggtccgcgtcgctggtactgagaactggtggttcaacgtcagcggcgtgcagatcgagcccgtgtcggcctggacgcccaacttcgcgcaattcggaactggagtgcagttcccctgggagaaccgcccctggaacaaccactcggcgcgtttgttcgtccaggacttcctcatcgacaagcacccggtgaccaacgctcagtacaagaccttcctcacggcgagcggctacactcctaagacggtggaccgattcctgctgcactgggagaaccgcaacggcgcccctgcgtcctggagcattccttcgggtttggagcaaagccccgtggtgaatgtcgcccgggaggacgctgaagcgtacgcttcgtactacggcaagcgtctaccgcatgactgggagtggcagtacgtcgcctccaatggtgagagctacgatgcgtacccgtggggaccccagctggacaccacccgactgccgaaggttgttcatggcaaggaactgccgacgctgagtcccgtaggattgttccagagcgcgcgctcgaccaagtttctcgtggaagatctagtgggctacgtgtggcagatgaccgaccagttctgcgacgcgcacacgtgcggagttgttcttcgaggcggaagcagctactacccgatctccgccacgcacagcgatcccaactggtacttcccgcaagctctggactcccagcaccacaaccgcttcctcacgatcagcgaaggctacgaccgctcgcccatggtcggcttccgctgcgcgaagagcatcaccccgtctcgcgagtttgacgttgtggcgtaaatggggaattcgagaaaagctttgggaattttgtgaggtgcaggtaggacgatgataacgcttttgagcaggactgcatcgctaaggctaaaatgattttgcattagataaaaaaaatcggtgaatgatgagctaactaacatccaactctcgggatgccatccgtgatctgactaaattgtgcgtgctttggtctaaagcaactcgttctgatgggcttgctatatttgcccactctgcatttcgcaagttccagccatagcgaccaacgaacaagacaaagcatcagcgtaccaagcaccactcgtgttggtccagccttcaactgcaacccatcattgcagagattcttccgtgtgctctgcttcttttgcatcgattcaacatcctgggccagctttcgacttggagaatgaattacggcattgtactgggtgtgcagcttggtgcgtgctactctgcttcggggcatctggggccccatcgccctgccatttctccgacttgccgttgctcaagtcatgtatatcgtcagcgcaagcgtcattgccggacttgctgcagtgaggttggtctattgtctctacaggtgggaatcgacccaaagttcgttgctcgcgagcgctgggctgttggtgcagatacaattgtacagaacagcttcaagttagtagttgactgctcgaccccttaacttgacatggctgggctacgtcggtgatgcctgatgcacaactcaaacctgctcgacttatctctgtgggtattctcccttcgccgcatcgcatcaagaccaattgcgaagaatctgcacggtacaactcagtcgaggcattcgttggcaattggcgcttcagcaagacggttggaaccctataaaacttgcatgtgctccctcaggtttaatcccgttagcgagtcgcttcttttcagaacttgctttggtagtcaacggccaagtcggttggttggccctctgggacggactcaaagccttctcacttcggaacgagtcaccgagtgcagcagcccgaacttgagtcactgttccgacggcaagagctcgagtatgtgtgctggacgctactggagtggagactacgaacaaccacgcggctacccgcgttcgtccgactacacgagccgaaaccgtggatatgacgggcgtgacgatcgtcaacacgagcacgaagccgacgaccgctacacccgcgctggagggcatcggggggacgactatcgtcatagcgagagctatcgaggagaccgtgcagaccaataccggagtgatgatcggtacgcgcgagatcgctcacggggacgagaggaccgcagggaagacgagagaggagggcgagatgaagtccgtccccgcagccgagaacgcaggcaagaggatcaccgcgggcgagaacgcaacactgatcctcgacgcagcggcggcggccgtggcttccaaagcaaagggcgggatggagatcgcggcggtggcggtcgtggccgacaaagaccaggagtgggtcaagtgactgtttcgggctatgagggtattggttctaccacgatggacccagagcggcgatacgagtggagtggccgtgcagagtcccaagctgtttcgtcggatgatgcagatttacaaaaaggagtgcagctgtgccaccgcccaacaactgcagctcggcaaggctgttccattgatctggaggttaattttttcggcgtacggcttcggtcgcggcctaaagaaatctttcaatacgacattgcggtggagcgcgcgtgtatcaatgcgatatatgggcctccgggagatgctggatcggttgagcccggtgaagttaatgctaggggaacaacgcagcctggtccaccggttaaagatgagcgatcagatcgtccgatcccgaaaggtgtcgtgacgagcgcaattagcggagctttggagcagtacaagcccgtattcgagggtcaccgagtcgtccatgacggtgcggcaacgctctattcgccggccatgttctcgtggcacgcgtacgagtttaaggatgtgcgaccccacgtccacccccgagactgcgacccacaatccccgcccggtagttaatgttgaaagcagatgaagtgtggagacgctgcagtcgcgcaatttccgtggccagacgttcattgttcagatcaagttgtcagcagtgatcgacacttcagccatggacacttacttggcggaccccaaggtggatgtgcagccgcttctccacgctctcgacgccgtggcgcgttaccagagttcccagaaattaattaccgcgggctcgaagctgatcacgacgacgcagactaaatccttatcaagtgggaaggaactgtgctggggataccgccaaactctgcggatgacagaacggaagttgctgctgaatgtggaccaaaccacgagaatctgctacgctgagggcccgctcgaagatctagtggcgaaagctctgtccgtacgcagactcgaagacatccgccgcctttcagagcaagaagtgaagaaactagctcgcgtgctgcgaaggatcaaggtcgagccgactcaccgctcggagcgcccgcgaccgattaatggcgtgagctcccaaccagccgacatgaccatgatcacgatcgaagaaacggagatgtcggtcgctgcctatttccttgggcggtacaagttgaagctgcagtgcccgacgttgccccccgtgaatgtcggcggcagacgtcctgacacggagacatggctaccaatcgagctgtgcagggtgacaaaaggccagctctgccatgacgaggacgagagcgacgcgagagagaccattcgcatgagcagccaggatccgaggacgcgccaagcaaacatcgcagctcgggttcgcgaagcagaattcgacaaggatccgtacatggctgcgtttggcttggaggtagacgagcgcttccagcgcacgagagctcgggtgctagacgctccggacgttcagtacgcgaacgtctcggagcagccttcgagtggtcaatggaattttgagaggcaagcggtttgtggatggagtccacgtccagaactggggaatcgttgtacttgccgatatgaaggatgataaacttgactactttctggatcggctgactgcggtgggggaaaagcatcgactcgtcttctcgaagcccattcggatccattacaatgagtatgacaacatgccgctggacagcctggtaaccttctgctatgaagagctgacgagacgtgaaaacgagcacggacctccgcagctcttaatggtggtgaagtcggacaacaactcggaggagtatggccggatcaagtacatttccgacactgtgctgggactgccaagtcaatgcgtggtagctacgacgctgctcaattccaatgacctggcccagatctgcggtggtttgtgcctcaaggtgaatctaaagcttaacggcaagaacgccgttttgcgacagccactgccgctcgtaagctcgtcccccaccatcgtgttcggagcctgcgtggagcaccctcgaccgggaatggacaagccgtcgatcgctgctgtcgtggcgtccatggatcgctactctgctcactatgtgtcgcgagtggcggcgcagacttcctccaacgacgtccagcacctcccgcgcatgctgcgcgagctctttctggcatattaccagagcaccgagcgcgaacctgagcatatcatttactaccgtgatggagtggacgaaggccggatggaggacgttctaaagggagaagttagcgctattcgcaaggctttcatgatgatttcgaccgggaaggcgccgccgatcactttcatcatggccaacaagcgcaccagtctgcggtcgtttctagtgaaccctcgagacggcgacaagaagggcaatgtgcggccaggtactgtgatcgacacgggggtcgttgatccgcatcgcttcgacttctacttgtacgggcacagcagcgctcaaggcacgagcgttccgtgccactacacggtgctgttcaacgagaacaacctgtcagcggaagacatccaacggctgacctaccacttggacttcacgtctccgcgcagcacgctcggtcgccacacccgtcaagtgcgcgcagcttgctgcacagcgcgcacagatctatcaacaagaaagtggagacggcggatcggcgacgggctccgacagcatttcgaccgcgtcggcgtacgagttcgcagaggtgcacgcagacgtccgcaaccgcatgtactacacgtgagcgctgagccccgagttgaaggaatgaaaggactgcgaagaaggaaagaagcaaggagcacgagcacgatcaggttgcagtcccgtcaagaattttttttcatttctaatggttggttttgggtgagttgctttgtgttattgtgcttaggaagactgcaagatttggtacttcgaacttcgaaggcttcgaagtaccgttacaacagaacttgtcggaggcccccatggctcctctggcgaagaagaatccatggcggcagcccatacctgctcgacattttcttgcatctgccgctgttccatttccgttagttctttgcatagtatgcggagtgcaacaaggtgactgcaatcaacttgatcccgttaaccggttgttttgtttcggaatatgctttgaagccaacggtctgggacgtggctctgtggccccattcgagttcctcatttcaaaagaagctgcggcgagcacacatggcaaggaacgagtgagcttggagttttgcttcaatggagattaccgtgttggaagctgtggactaaaccaaaagctgcgcgggtgaagagcgcgagtaggccattcgatacggtttgtctcgttcttctgattatccaactcgtcgccgtggatcaacacgctgacagtctatctcatgtttcttttggcgaaggggtcattgtgccatccaacattcgcaggacgtatccggtactgcatcacgcagtgtttaattcctgggaactctggtaagaagccacgacttcgaaagcatggacatggtgacccactgtcagtcgacaacaatcggtactgtatttcctttttattattgtttgcgcgtggaaaagagtagactctttcggtgtgaatgttgtgttgctatgggcaggcgaggggcaggtgatggcccaaaatcttcagcagcttcgtcatcttccgttcgaagacccttcgtgtactgctcctcgcgattgcatgatgggggtgccaccgcacagtcctcggtgacaccccggacttgctaacagtactgcgagccacacactgctgtgcggggcgcagaactgcggtgacatcaacatgtcggagcgtcgcgtacgtggcctgtgtgccggaggtatggaccacagtatctgtttcacgactaaggtactgcaaatgatgctcaacgcgttttacttttatctgaccaccagcgcattgcttttatttcgcagcatcaagatagtcttcgcggtgcagcgctggggtgacaacgtcggcaattagcccacggaacaagctggaggtggtcgtcatactgagcgaaagtgcgtcaaggtgcttcaacattgcagcaatctctcgtctagagacgacagtcgtttgggagatgaagtcgagtcgcacatcgagtgacgcagcaagcggccacacaaaaaaagatcgctgtaccacgattctcgtcaccgtaactgaagccgccccctgtacgtcatattagatgtacaaaattccagcctcacctttctttcggatccaggatgtccgaagttagcagaagctcaagtctaacgaagccagaagctcaagtctaacgaagccagaagctcaagtaaaacgaagctagaaatattaatattattgttttctgctattcgtctccgcttgtgaagtttttgaatttgtttctctgttgacactatgtgtgaacttcgatccgatagtttcacactcctatcatgaatacagtacgacgaatctcgaagcgtgtttgttccgatgcacttcaacatttgacacgaactctggtggggtgacatatcatagtagtcgcagtgcacttgtgccttgctgggattgacatgcgaatagtagtactgtagtatttgaatagttagaacacctttatgtattacttcacatgtcatttacgtagtgcatattattttattatacatgttttaacttctaatgtgttatagctacaacttcaccgcgaggcgacaacaccaggtaagaaaggatgtttatgatctcgaccctttgctgtcgcgatcagcgaaccaagaataagaccaagttcccgcgcggccacccgccagaggcctcgcagcggaggcggttctcccttcttcacatcgctacgcctacatatatatacttaaaagtatcatgaaaatgatactttattgtggacaacacatcgtcaggatgactgcacagctcaaaacccgagcatggcacgagcacatgacggtaatataccgtatcgctcctgtcctaagagaagttttctcctaagcgaatttctattttggccaatgagagcctgatttatggcatatggttgaggaaactacagcgctaatcagctaattatagacgacgggtaatcactcgtagatggaaacacattttccagaccgttcatgagaccaacgccacatgatatacaaagaagcttgaatacgtagcagcagaaagatataacccccaggtatgtgcaggtagacgcctttcatgcccaattttgggtcaaatgaatgagcctaaatactaggttttagataccaattatttggtaaaaaagttaaccctaacatttagaacgtacattgacgttcgcttaggacaggagcgatacggtaggcgcattctgacatcaagagcccgaacagttggaggcttgctgggtttgcgatttgctgggttgtggactcagaggctctgagtcagagctccagtaggcctcgctcacactcactcactcactttcccatttctccaccaccagcaagaccccaatggagtctgtactacctcattactctactcgcagtgctcaatccctccccgaagagaccagcgccaccaagaagaagcgtcgtcagaacgtcgaaaatggcgggctcgcagcaattgacgaactggagcacgccaagccaagactaaccaacacgcacaagcttcgcatggtgagggcactggtgacagccatggagcacgagctcctagacctccagtccaaatgggccgagcagatacccgacgtacgcacacgggtcacagcacaacgctgcgccttggagaagtacatcgctcggcagagtgacaaagcgcaccgagagctccaagaactgtttcaagagcaccaactcctgctagcttcgctgcagacggccgtgttcaaaagtcccctgcattccagtggccgcgaaatgtttagggagctccacttcaacacccaactaggccgtgacccagacggatgctgattgaacacaacagacgatctcttgcgacggtgccctctatcgtggagaagttctcgcaactgacgattgacaagaagatgaagaaggcaggggacatctcgatgatgccgctgtctcacattgatatctccggttgtgaggactgcacactggtgtcgagcgtcttcatctcggagattcctcacacatctttggaggtcgtctacgcatctgtgctcgcttacttcggctcaatagctgcgacgctgaagcgccacttgggcgttgataccacaacccagcttctcaacagcgcggagtctccggtgcattatttgcgctcaagtttcaagcgtcctcaagggtcttggacggagaattacgttttgtgctcggatctcacgccggctcacggaatggtccacatcgacgcggtgacggacgatccgctgtgtcctgtgtccgcttccgcgtcgtggcagtacagtatttgtggtctcactgttacgcctcggaaacacaagttgacgggtagaacgctatcggtgacgctgcgttgggtggttgtgtatcgctatgagacgatgccgaatgatcctgcgatccaagcagacttggagattatccgacccattttgaacggagacttgatcactgcgtccgtatgcaactatatccaggaactgcaggaaggacgcaaagaactttcgtttagaaagacgtggagacttgaagaagctgaattggaagtataatatttagagacaagattgcacgaaatgtgtggttatttgctacgtacgttcttggtggcttcactcctattcctggtcactcttcgtagtagttgctggatgatcctagctgtgactgacgtcctaacaataatgttgttgcgccagaccacggattttcaataaatcaagcagcgtccacacgacaaatgccgcttgaagtgtccacgtgattgactccatgaagtagtagtcggagcgaacggtcctgaggtcatcccgaggccagtgattcagcagcagttctcgcatatagatacagtagaccaacctcagtgcggcaagtccagcaatggcgcttgcgctgacgatatacatgacctgagcaacggcaagtcggagaaatggcagggcgatggggccccagatgccccgaagcagcagcacaagcaagagcagtgagtagcacgcaccaagctgcacacccagtgcaaacccgtaatgcattctccaagtggagagctggcccgagatgttgaatagattcaaaagaagtagagcacacggaagaatctctgccatggtgggttgcacgtgaatgctggaccaacacaagtggtgcttgctacgctgatgcttgtcttgttcgttggtcgctatggctggaacttgggaaatgcagagtgggcaaatatagcaaaccgatcggaacgagcttttcaacaggcgcggcccctaagaatgtacctatattctaaaagctctcacttccggtaacgaggtccgactatctcctaagatttgccattttattataaagggaccacaatgaagtactgtacacgtaaaatatattttaaaagctcaactgcgaagcacgaattataatatcttctacactgacgtcttcgtcataagtggtgtcgttggaatcgccgcacctttcatctacaccgttaaaaacaattccagtatggcggaagcagttttcgatggccgacttatcctgcagctcttgccagatctccttgcttcaccgcatagcttgcaactgatcgaccgcgtagggctccttcttcagcttcttcacgtccttgatcttttcggacacccagagaatctgccttctcctgtacgcccgcttgaacagtgcaatgatgccggcgtccataggttgcaagtaggtagtagtattcgggggtacgaactccacgcgaatgtttgtacacaccagatcgccggtcttatgagaagacgcgttatctagcagcagcaagatatgacgccctgccgctcgcatgtcccgatccagattgtgtagccattctcggaatatcggtcctgtcattcaggccttcgcattagcccggtatgagaagccgaggctttctgcagagcgcttctcaaagcaatgaggctgcttggcgcgacccaggaacaacggcggtagtgcgtccgtgccgtcagcgttcaccgtgagagcaagcgtaatacgggtcttcttcttcttgactcctcgcgcccgcttcgtacaaatagaccgagctggggccattgcgtagcaaagccccgtctcgtccatattgtagatgtcctttgcagggtagagatccgtgatttcttggagtcgttgacgaccttgagctacagcagctggatcagcggatccagactcgccgggtcgattgcggtagcgaaggcgatgcctatgttcaaatgcagtgagccagccgtcgcaaaatcccaggtcccatgcgtcgcacagctcacgctgaatgtcgatcgctttcatccttatccgctcgcgggacagacagacgttctgggcctccaccgcttgaatccacgcccacagtcgcgcctccagcgccgccgaggtcaccttcaggggcttgcggcggttgccattgccgtagtccttgctcatgatcaacgcagccttcttgagtatgtcggacacggtcgactgggccggtgcgcgcttgagtttgtagtgtacttttgtccacgctgtgagcgctgcttgtgacatcgtggggcagtcggctgccttctgtatgaggcctcgcttctgatgtattttcatccaggcccccatggcgttcttgtacttgtttggctcagtgaaaattctggtatgaagacctgcttcgggcttgcggctgttgctctgtggcaatgactggtgtgcagtagttcgcgcaaaactcccaccagggtttagtaaaaataaacctttccaaatagattgcatcgtttaattcgggatattaatttataccagtaccggaagtgggcgcgcttactgtataactaccgtcgacaccgcatgaatttggatatcgcgaggtaaataaatgcatcagctgacaacaatgatgcaagttatttggacgtgtcaatgcatcaactcgggcgtggctgagacaagctgacacatccaaacaaccagggaactcgtggtgttgttagcgaaggtcaaaaagcaaagtttgcacagtaaggaaacgacttcattgacgttaacacctagagctatagactgctctacgttcgatggttgcccaccgctcacgacagcctctatagcttgcatgatcaatcgctttcggaggtggcggctaacggtactttgggttgtaccaagccgcaacgcagttttgcgctggggctcggaccctgtcagctcgagaatgaggcggtggtccgcctcagacaggcgcgtcttcttcttcccgtagccagccgctcgacgtagctttcgggcatctgcatcggagatcgctatctcctctctagcttctgcacgcactctcaactggtctagtcgccgaacttcacttgcttttgctgctgctagccgctcgtagcgttcttgttctttcgcggccgataccttcgcacactggtacgccaaagcaagctcctcaatctgacgtctgcctcgctgacgtgcaagtgttcgcgcccggtcggtctgtttggcttgccgtcgctgacgccgcgagtcctccaagatagcgccactggagcggagattgataccttctagagcaggatcaagcgcgatacttgggttcagtcgcggtagctgagaaggaagctcacgcgggcggcctctcgtgctaatgtttggtttaggaggggagttatgggaatctgctgctggtggcggtttgcgttgtgaggtgcgagagggtaaccctctccgagccacaaatcgctttggttataaacatgcggtgggttcatgcatttatttgcgtcgctggcgctttggatcattgttgtcggctgatacatttatttacgtcgcgatatgcaaattcatgcggtgtcgacggtaccagaaagaggctactagtgcagacacaattggtaaccgtgctcggaatgtgaaaaatgcgaaaaacagctctgcgcattccgagcaatgctctgagcgcgcgaaagttgctgtgttccctccacattgtgaaactcatacattaccggccatttgcaacccgggttgtatttctggagcctttgattggccagctgtacggtatcagccacgattctggcgggtacggcgccctaacagcggggtgttgttcgctactttagtagcgcatccagtaataaatactgctatgttttgctacccgaacccaatacaaaaatctagtgagtgtagcaaactgtgacggggcacacaacacttcttcacagaggaagcaggagtatacaaactccaagtgaacagccgttcacgtgtccctggtctgaaggggacgacttgacttgaaatgcggtagatctaagactgaatgtatttataggttggtacagatttggcctgcatacaaatcctaagttccctatagtttgtgtcatacaaaatgtatctgttggctccgaggccacttgggtcactatccaggggagtgaccgatgtagccatcccttaatagtgacagagtcactattccatgtaaccccgttacatcctcccccacttaaaatcgatcttatcgaccaatcagagcgaggttacgcctgcgactcacatttcactcgcaaagtcgaaatccatcgacaacggcgcgagctctgacgcctcgtctcccgggcctcacagagcaactggcgcatcgccgagcaagccgcagggtctccacgtcgaccggaagcatgcctccaaagcgcagtgcgcgcagtgcgaaatcactttcgaaaccgcgggccgtagggccgaagaccagggcggccaaggccaaggacgagtcgtccacgctgatggaggccacgaaggcggccgaggaggcggtgcgctcccgtagcagcacgccggagggcgggtgccggtctcggagtcggagcaagactcccgaggccacgccaagtgatgaggggagctctcggccccagtcggagcaggccaagccggccttcgactggtcggccaacatcaagaactgcacgctggttgtggattccggtgagagctcacccgagggcagcgacaacgctgccaaagacgaagcactggcggcgagcagcacgcccagctctccgcccttcccgaaggctccgtccgagaaggaggccgaggacgtcgagtccagcgccggtgtcggcgacagcaagcaggcggaagaagacgacgtcgtcatggccgacacggaggacattgccgagaagtcgtcgagcgacgcgggctccgagcccaaggcggtgtcgccacccaagcatctgacgctggcacaaggtcgtgagcgtgcccaagcgtcgaaggcggctgccgctgcgaagaccgaagaggccagggcgaagaagcgtcccgtttccaggtcgcctcgcggttccagctccaagctgttcagagactcggagtctgaggacgaggagggtgccgtccatgagcccaaggagctctccaacgacctcgacgagcagcaggagcagtaccacgctgctcgttcgggggcacacgccaggcagtcggctgccgcgactgctgtcgagtcttcgtcaagcggtagtgccacgtatccgcagggctacttcccgcccgagcctggcactggtgcgccgcacccggctcctcgtggccttatcggcgggtacacctcgaggggttcctatgagcgtgctcttgttgagaaagagccactctttcttggcgacgttgaagtcgcccggtgtgtgctactagcaccacacaagctcacactgaaggagttcaccacgcttcgcaagaagccggagggcaagggtggactccatcctgtgtggggtttccactgggtcaagcgaatgacaacatgacctggagcgaggtggaagacctcttctggcgctacgtccaacgcaaagggtattccgaccaagagttcaaagaacttcgtgaggatcgcactctgtccgcaatcctggacgtgcgcgagctcctcatcgaattcgctcaactcgtgagcaagcgcaagctccactcgaaaacggacgagctgaagcaagaggcgagagccaaagctcgtgaagagcgtgggcgtggtgcgactacgtctgctaccgtgccccgggtaccggccaagaagccaaggactacttacgaagctgccgctgcttctcgtcccatatctcaacagccttcgggcagtctgcctggagctgctcaacgggctcccacgagttatccgactcagggtaaccactccactttacgagcagctggcgcttgccatggagccgccgctcccggacgactcgttccacgtggtagtggatttgcccattacgatcaaggagggccggcggtggcctagcacggccatggctacgagcctgaggcgacgcagccgtatgctggggccccgagtcaggtggtggccctgcagcaagaggagattcgtcttctccgggaccgtgtgtacgtcctcgagattgcgcttggtgtcggtcttggcggcgaggctgccgctcgtgctggtcagcctggtgccgtggagcggcttcgtgaggatgttgcctcgctctatcaagaaactcgcagtcttcatggccgtgtggatcgtcgagccgacctgtcgtcttacgactcgctgcgaaaccagctcgctggccttcgggccgagcttcatggccacgcgccgtatccggagcagcagcagccccactcgtatcaggcccagtttggccagggctcgtacagggcccctgcgtatgctgctccgatgtacgccgcgccgtcttacgaccagcgcgcgtatcaggcgccttaccgcgacccgacgccgcgcttcgaggagctgcgctcttctccaccgggccacccaccgcttcctgcggggcagccagagccagagggtcatggtacctcttaagacgacccaaagcggtttgcgtgttggagtcggccttgaccttccagcgacggttgtcgagaccacgagaagctcgctgtcagtcttgggcaagtctgaatgtggctacatccggcaggtataacacttatcgagtaagaacgagaagcatctttagttttgtatgattacttatttgcgtgaagcaggaaattccggacgattccagaaataagtaggaatggaataaacctaaccgtaatgagcgacgattggatgaaaataggtaattaagcatcaaatgataagaaaaaaatcactgattggctacagcgaggtggcaagctttgcataggggtcgggtgtccggccaaatactacttatcctacaataatttattgataagggtagccttgaaatcattttttctcgtaacctgagcgcccgagtctgctcagtgttgcgtgcgagaagctggaggagtagggggtggtcaagaaggtcgccgagatcgccgaaatcaacgctgccacgtttcgtctctacaaataacattggggttgcaaatggccggtaatgtataaataccagcagggcgtgcaaccgggtttgctaccgggcgctgattggctaattataatgccgcacgctagaaggcaagttgaaggcaagtcaggagcactaagtaaatctatgaacggaggctaggatgaccacctcgcttacgatcggcgcggagggcagccaaaatgctcgaaaccgaaagctgtctaccatacacaacgtacactttgtcgatcgcagcatcgctagtcgaacgaggttcgccacaacgtcccaaaaggcttttcttcgagagtatgcgaacttgttcgcaccccgctcgatcggcgtgaagttctttgctggcttcaatccacagcagccgaactgaaactcgtgccacagctcgaatagatccttcggtcgctttgatagacgcgcagtagacacttgtagacgcgaaggtgggctcgctgcattcgccagcggctctgaaacaactgtgactggggtgttttctcgtctaatgacaggctgcattgcgacgcgcctcaatatcgcttgaaccttttgcatctcccgctgggtttcatgccgtaatcgctgcacttcactcatcacctccgccatatatcgtcgtccagcagcaagctgcgagtgaagagcggcaaactcgcggcgggtaccctctcctcccgatcttctgctaaccgggtgaggcccttgatggcccgaaactactgcgctttcgggctggtcgttgctgtcactgctgtcaatagtgatgagactcagctgggagccatcgcccaggacgtaaaactcctctcgttccacgggattcagatcagtgctcccgcccgcattcgtataggcttgaacaattttccgcttgagtttgtcaggaagcaaaatatacttgtagttgtcagcaggctccagtgccgcccacagtaacggcagcgctaaagtttgtgccacagcctcgcccataatctgcttgatcatcggggcaatctcgtccactagcagcgccaatgacacacaaccgatgtcatctttcagtctgtagaagcacggacctgcgggtcctgttagcgctgccgctgtgcatgcgtctgggtatggctgtgttattgatatatgcatcgaccacaccctttcgcgtacgccagcacccacggcgattcacaaaatcttatgacattccgcatcgagtagcatacgtggccgcccccttccgaagactgtgtgttccgagcttgcctgtcttcatcttcttgaaggccgtgtccttcacgatatcccccaaaaagcgacgcacggtgcgatcaccgtctttcgggttgccgtaaatgaactccgagctggacacattgggggtggcctcgatgttgaccgcaatgttgagtaacacgcacattttggggtccatacttccgagtactatttgttcaggggcgtctcgctcttcatgaatgattttcgaccagcgcatctggaacagcagcgtcgaaggatattggctgttcggcgagatgttggcgaactgcaacttcatcatgtcatctatgcgagccacgatatgccactgcaatgtcagaacgctgctcaccatgattgccgtctcaacccgcccccacttcgtacgcacgagcaataacaagttcatgaactcgtcaaactcgacggaacggcgagctttggactcggctccttctcggcgaacctcaaacttcttcactctcttgatgagcttgttgacagcgtcggagcgagtaggattgtcacgctgtgtaacaggatcccacgtcgaatttacgcgaggcatgacggttgagatggccttcttggagaactctagcgtgcttgaacggcgatggacaggtctcatgtcgtcgcttggttctggactcccgtacgtcagctcgttcatccagcggcaaacgtggtctggtgtgatgtcgaggagctcctccatggagaaggtgtgatcgctgctgtagttgacgccgttcttgtacgtcatgaacttcacgagcttcggcttatagcgtgctgtcatggtgaagactcttgtcgaactacttcgggttgcaacctttcgctttagttatacttcatagccattcctaatgtctattagcccatgtattatacattgtacttaggctttgtattacggcttttcgctgcgtctgtttgctaccctcactggatttttgtatcgggttcgggtagcaaaacatagcagtatttactactggatgcgctactaaagtagtgaacaacaccccgctgttagggcgccgtaccagccagaatcgtggatgataccgtacagctgaccaatcataggctggagatctccagaaatacaacccggattgcaaatggccggtaatgtatgagtttcacaatatggagggaacacagcaactttcgcgcgctcagagcattgttcggaatgcgcagagctgtttttcacattttcgcattccgagcacggttaccaattgtgtctgcactagtagcctctttctggtacctaaatatgcatcttctcggagaaatccagttataggtacattcttaggggccgcgcctgttgaaaagctcgttccgattggttttgctatatttgcccactctgcatttcgcaagttctagccatagcgaccaacgaacaagacaagtatcagcgtagcaagcaccacttgcaaaggagttcattcgcaggttaggagggcaagtcgtagacttgttgaggcgccccctgggtgtggtcgaggtgggtagcgcgcgagaaccgtcgcttgagcgcgcaaatctgcgaataactgcccgaatagtaactactccactaaccctatcctatcactacaattctctatcctattcggtcaatcgtaatttggtcactcctggtccatcgttgtcccaggtcggcgtcaggaaatgtcacgcgaacacaataatgccactcgaatacagcgaactcaagcggagtcttgccaccaagcagccgggcagcatcgtgaacagtaacgggagagaatacatcgatagtgaaatcaggcgcagccgaagattcgttggcttgggggtccgtctcgacgagatctgttgacttggggtctttctcgacgtggtagtgcatgaaccatcgttcttgaaagcttccagttgagacgcagctcagggagaggagggtagcgagaggcgaaatcctgacgtcatggctcgggcatccgcaggcgtgaaagccgttttagcagcacttccacttgcaaagaccatggccgtgtcgctggcgctggtcctgttaaaaattgcaaataccagttagttggcacaatgtgaaccccaatgacgtacgtgtatgtgcggtggggccaacgtggtcgtcgatgccgtggtgttggcagtatgggctatcttgttgtcggccggataccatgaggacagggctcgtgctgctgtcatgtccgctggcgacggatcgtgttcgatggtcgtggatgaccatgctcgcaggccctggatgacaggaagtctcgtgggcgttcagcattggaaagcctgggctcgtgctgcggtcttgctgctgctaagtgcgatggtcgggactgcgtttggtcagtgaccacgtggccgtcgtggcatcatgttcgatggccagagctcacgctgctgtcctgctcgaaggtcacggctcgaggttcgataggtgtagatggacatgctcgatggtaggaggtcgtgctggtatgggcatgttcgccggttgtgcatgggcaggtagactcgccatcgtggaggactgtggccatgctgctgtcatgcagctgtcgtactgctgggtgactcagtggtcgtgactgaatatgatcggtgatcgctgggacgtagtaactactccactaaccctatcctatcactacaattctctatcctattcggtcaatcgtaatttggtcactcctggtccatcgttgtcccaggtcggcgtcaggaaatgtcacgcgaacacaataatgccactcgaatacagcgaactcaagcggagtcttgccaccaagcagccgggcagcatcgtgaacagtaacgggagagaatacatcgatagtgaaatcaggcgcagccgaagattcgttggcttgggggtccgtctcgacgagatctgttgacttggggtctttctcgacgtggtagtgcatgaaccatcgttcttgaaagcttccagttgagacgcagctcagggagaggagggtagcgagaggcgaaatcctgacgtcatggctcgggcatccgcaggcgtgaaagccgttttagcagcacttccacttgcaaagaccatggccgtgtcgctggcgctggtcctgttaaaaattgcaaataccagttagttggcacaatgtgaaccccaatgacgtacgtgtatgtgcggtggggccaacgtggtcgtcgatgccgtggtgttggcagtatgggctatcttgttgtcggccggataccatgaggacagggctcgtgctgctgtcatgtccgctggcgacggatcgtgttcgatggtcgtggatgaccatgctcgcaggccctggatgacaggaagtctcgtgggcgttcagcattggaaagcctgggctcgtgctgcggtcttgctgctgctaagtgcgatggtcgggactgcgtttggtcagtgaccacgtggccgtcgtggcatcatgttcgatggccagagctcacgctgctgtcctgctcgaaggtcacggctcgaggttcgataggtgtagatggacatgctcgatggtaggaggtcgtgctggtatgggcatgttcgccggttgtgcatggacaggtagactcgccatcgtggaggactgtggccatgctgctgtcatgcagctgtcgtactgctgggtgactcagtggtcgtgactgaatatgatcggtgatcgctgggacgtagtaactactccactaaccctatcctatcactacaattctctatcctattcggtcaatcgtaatttggtcactcctggtccatcgttgtcccaggtcggcgtcaggaaatgtcacgcgaacacaataatgccactcgaatacagcgaactcaagcggagtcttgccaccaagcagccgggcagcatcgtgaacagtaacgggagagaatacatcgatagtgaaatcaggcgcagccgaagattcgttggcttgggggtccgtctcgacgagatctgttgacttggggtctttctcgacgtggtagtgcatgaaccatcgttcttgaaagcttccagttgagacgcagctcagggagaggagggtagcgagaggcgaaatcctgacgtcatggctcgggcatccgcaggcgtgaaagccgttttagcagcacttccacttgcaaagaccatggccgtgtcgctggcactggtcctgttaaaaattgcaaataccagttagttggcacaatgtgaaccccaatgacgtacgtgtatgtgcggtggggccaacgtggtcgtcgatgccgtggtgttggcagtatgggctatcttgttgtcggccggataccatgaggacagggctcgtgctgctgtcatgtccgctggcgacggatcgtgttcgatggtcgtggatgaccatgctcgcaggccctggatgacaggaagtctcgtgggcgttcagcattggaaagcctgggctcgtgctgcggtcttgctgctgctaagtgcgatggtcgggactgggtttggtcagtgaccacgtggccgtcgtggcatcatgttcgatggccagagctcacgctgctgtcctgctcgaaggtcacggctcgaggttcgataggtgtagatggacatgctcgatggtaggaggtcgtgctggtatgggcatgttcgccggttgtgcatggacaggtagactcgccatcgtggaggactgtggccatgctgctgtcatgcagctgtcgtactgctgggtgactcagtggtcgtgactgaatatgatcggcgatcgctgggacgtagtaactactccactaaccctatcctatcactacaattctctatcctattcggtcaatcgtaatttggtcactcctggtccatcgttgtcccaggtcggcgtcaggaaatgtcacgcgaacacaataatgccactcgaatacagcgaactcaagcggagtcttgccaccaagcagccgggcagcatcgtgaacagtaacgggagagaatacatcgatagtgaaatcaggcgcagccgaagattcgttggcttgggggtccgtctcgacgagatctgttgacttggggtctttctcgacgtggtagtgcatgaaccatcgttcttgaaagcttccagttgagacgcagctcagggagaggagggtagcgagaggcgaaatcctgacgtcatggctcgggcatccgcaggcgtgaaagccgttttagcagcacttccacttgcaaagaccatggccgtgtcgctggcgctggtcctgttaaaaattgcaaataccagttagttggcacaatgtgaaccccaatgacgtacgtgtatgtgcggtggggccaacgtggtcgtcgatgccgtggtgttggcagtatgggctatcttgttgtcggccggataccatgaggacagggctcgtgctgctgtcatgtccgctggcgacggatcgtgttcgatggtcgtggatgaccatgctcgcaggccctggatgacaggaagtcttgtgggcgttcagcattggaaagcctgggctcgtgctgcggtcttgctgctgctaagtgcgatggtcgggactgggtttggtcagtgaccacgtggccgtcgtggcatcatgttcgatggccagagctcacgctgctgtcctgctcgaaggtcacggctcgaggttcgataggtgtagatggacatgctcgatggtaggaggtcgtgctggtatgggcatgttcaccggttgtgcatgggcaggtagactcgccatcgtggaggactgtggccatgctgctgtcatgcagctgtcgtactgctgggtgactcagtggtcgtgactgaatatgatcggtgatcgctgggacgtagtaactactccactaaccctatcctatcgctacaattctctatcctgttcggtcaatcgtaatttggtcactcctggtccatcgttgtcccaggtcgacgtgccgaagcagagacctgccgtttgaaaaccccgatatccatctaggatatcattacatttccactcgcaagatatctgtaagtagccacgccgagaaagtgaagctcctcagctcatatccattttccggtaaggagcttgccacattgtcatcttccaaaacgatcttcatgggggcaaaggagttcattcgcaggttaggagcaaattgcctggcaaatcgtagccttgttgaggcgccccaagagtaggaagtaggtggcgacttcctgcgaatgaaccggtctggcaacatcgcgatgcatgatagcgtgtgcgcgctggggcccccaaggttgcgtaacacgcacattttggggtccatacttccgagtactatttgttcaggggcgtcttgctcttcatgaatgtttttcgaccagtgcatctggaacagcagcgtcgaaggatattggctgtttggcgagatgttggcgaactgcaacttcatcatgtcatctatgcgcgccacgatatgccactgcaatgtcagaacgctgctcaccatgattgccgtctcaacccgccctcacttcgtacgcacgagcaataacaagttcgtgaactcgtcaaactcgacggaacggcgagctttggactcggctccttctcggcgaacctcaaacttcttcactctcttgatgagcttgttgacagcgtcggagcgagtaggattgtcacgctgtgtaacaggatcccacgtcgaatttacgcgaggcatgacggttgagatggccttcttggagaactctagcgtgcttgaacggcgatggacaggtctcatgtcgtcgcttggttctggactcccgtacgtcagctcgttcatccagcggcaaacgtggtctggtgtgatgtcgaggagctcctccatggagaaggtgtgatcgctgctgtagttgacgccgttcttgtacgtcatgaacttcacgagcttcggcttatagcgtgctgtcatggtgaagactgcttcgggttgcaaccttttgctttacttaggctttgtattacggcttttcgctgcgtctgtttgtgtaacggggttacatggaatagtgaccctgtcactattcagggatggctacatctgtcactcccctggatagtgacccaagtggcctcagagccaacagatacattttgtatggcacaaactatagggaacttaggatttgtatgcaggccaaatctgtaccagcctataaatacattcaggcttagatctaccgcttttcaagtcaagtcgtacccttcagaccagggacacgtgaacggctgttcacttggagtttgtatactcctgcttcctctgttaagaagtgctgtgccccgtcacacttggtagcacttgtagtcaatcttacgcctacgcgggtagattggactacctgaatcctctgtggtctcatcgagtgagccaagatggatcgtacggagtttccccatctgaacgactcgcagtacgagtccgttcgtaagatggcaggcatctttgggacagatgccctgcgtagcttagcggcggcgacgccggctgagcaggttgagcgtatcaacgcgttcgacacctacgagcgagggctcatcgcccacgttcaagggctgcaggccactgcggccgcgtcgaagccggtgcaaccgaagctcctgcggctgaaggttcaccccttcgaagggaaggaaggagaaaaccttcacttctgggttcgagaggttgagctcgcgatggacgcggctctcgtctcggacgagcgactccgtgtcgcctttgcgctctccaactttagtggtcgccctaagagttgggcgtatacgcgcgaagcgacgacgcctggatgctccgcatcatggtcccagctgtgcgagcagctgcgagccgcgtttcttccggcgaattacgcgtaccgccagcgttcgcgcttcctcgcctgcaaacaaggaaggcgcgagctgcatgagtacatccaggagatgcgagttctcactgcctctttggtggggaaccccctgcctgaacacatcaaggtgaccgtgttcatggacggtctgcgtgttggtcctgcccgcacgcaactgttccgtgtgcaagcaaacactatggaggaggcgattcggatcgccctccaggaggagtacagccacaagcaggctcgtacccccgccacggtatggcagagcaaccctgcctctggtggtgcgcctaatggtaactccggcaatggagcgatcaacgggccggttcccatggatctgggcatggccgagcagagctacattcgctgctacggctgtggcaagcttgggcacatgaaacgtgcttgtcccgcgggaggactgaagaagaagttctcttcgaagccctttggctctaggggtcgctggcagaagccgcgccccaggaaccaggggaatgccggacaccagtaggggcggggcgccctactggggaaacactaagtcttcatgaggggcgtgcgggtggcgcacgccatggggacttagcccctgagagtctctgtactctcgaagcggagaagggcagcggtgggctgcttgtggtgcacgcgagtgtaccgggatacgatcatcccttgagaatcttgatcgactctggggcgtccaagaactttgcgcgccgccagactgtcgcacgcaatcgcgacaagtacgccgatgcgctacgaggcagcaaaggcaacggactggtctcggtaagactacggtggtagaagtacctcgggtccacatggacctcactgtcaagttcgaggacttcgacagcacggagccgttcttggtcctagacatggacaagtacgacttgatccttggcatgccgtggctggagaaacacgagccttggatcgactggcgcggcaaggccatcggggccagccgttccccacgctctgacagagctttggtgagtcatgttcccacctctggcagcagctggggcgcccgcgagggccgccagggcgcagcagcgtctaatgagttcttagggtccgtcgagactgacgacgaccccgaccgggccggacaaggcctgagagtggaggtgccggacagcacctaccaggtgggtaacgtaggtccacacgcgggtaacaaagtaccgcaggcagcaagggctgctggagaaggcgccgctggcgttggcgtgggtaaccaagttccacgcgaggtcactcagaccgtaactgatgaggaaggcactgcagtcgcttccgatgtgggtaacatagttccacaggaggtcactcagaccataactgatgcgggagtcgctggaagcgctcctggtgtgggtaaccaagttccacacggcgaggtgggtaacatagttccacccagcaagacgggtaaccaagttccgctcaagaacaaggcgggtaaccaagtcccgctcaaggacaaggcgggtaacgtagttccgcacgagatcgagaagatcggtggtgccgtcaaggcggcgccacgagacgaagacacccgagggtcacgtcgtaagccgggccttcgtgtggccgacgacgccagtcgccagcgactccgagcctccagacaagacaggagctgtcgagcttacagctctgtccgaggtttcagagttgctgaaccttgaggagctcgccatggaggactttttggccgagctaaaggccggggatatcgcagagttggttctcctccgaccggagtccacgtcggccgagttgaactcgtcctcgggcatggaccaggaagtcctggaggagttccagagacagcgcgcgtcgcgcatgggctctgagattcttaagaacccccgggacccggtgtaccccttggtgaaggagttcgagaacgtggtgtccatggatccaccgtccaatctccctccggacaggggaatcaggcacgagatcgatctcgtgccgggcacgaagtactgtgtcacgaggcaatggcctcttccccgggagcagtgtgaagtcattgatgccttctttgccgccaaggcgaaggcaggcatggtgcgggagtcgaagtccccgcactcgacgcctactttctgtgttcgcaaaccgaacggaaagtggcgtctggttcatgcttataacaagctgaacagcgcgacagtgcctgcggagacaccgatcccgcgcaaggacgtgttgctcaacaacatggccggctgcacgctgtatagcgcgctggacctggtggacggatactaccagatcctgatgcgcgagagcgacatcccactcacggctgtgagcacgccgagcggtatgctctgggagtggctggtcatgcctcaggggctttctaacgccccggcaacgttcaatcgcttgatcacacaactgttctgacctttgcgtgtgttcgcacagacgtactttgacgacatcttcgtccacagccgtgccgaggcaggccagacggccatggaggtgcatctccagcaccttcgacgtgtgttcgaagtcgtgcgggcgaacaagctgtacgccaacatctgttcgcagctgaggagatcaaggtcctgggctgcttcgtcagcagcgccggggtccgggcggacccggagaaggtgaaaaccatcgcggcttggccgccacctcggtcgcagaaggacctacgacagtggttgggcctcgctaactacctgcacaagtatagtgcaggctacgccgagctggcaaggcccttatcggatctcctgaagaaggatgtcgactggcgctgggagcgtcgccatcaagatgcttttaacgacatcaaagcgagcttacagcgcgcgccagtcctggcattgccggacgagacgaagcctttcagcgtagtctgtgatgcgtctgactacgcaattggctgtgcgttattgcaggccgacgatgaaggccgcgaacgggtcatcttgttccagtccaggcagctcaaggcagccgaacggaactgtccaatccacgacaaggagctacttgccatgaagtacgctcttgtcaagttccgagtgcacctcctgggctcgacgccctttgtcgtttatacagaccacgcgtccttgcggactgccgtcaacatgccgcatctctcacagcggatggagcgttggctgtcattcttcgcggaatacaacttccgtgtcgagtacaagccgggcaagttggacgtgcttgccgacgcgctgccgcgccgacccgactacgagcttgctcatattagtcgggtcacgacggatctgtatgatcgcataccgagacgatgccaatctcggacctcttttttgcggttcttggccgctggctcggaagccaaggtcgagtggctcacgccccgacaacgtgcaaggctgcaccgtgtgcgggtcgcgtcatcgctccgacctcgctgctcaccgccttcgccggcaccgtctccttcgtctcgggcggcggacgccgcttggagcgggcgacactgacggccgaactgatagcagcagcggtgccaacggcatccgcggccaggccgttcactttgctgccgtcgagagcgacgtggtttgacgtcacggtcgtgtccctcgtcacctccgtggtcctcagtcggccgcacttcactcaacgcgcagccccgcttgtcgccgtatgcgcctcatgcttctccgtctcctcttcctccttctcacgtgcctaatctttgcccggcaccaccgccccgtgcgcgcactactcctgtagcgcctcctgcctcacatcgcgctcgctatgcgctgcttgcgcatcggcatctgccgcgtcgcctccatggcgtacagctcggcctcgacggagaggctcctagggccgcacggcgtcactcagcgtctcgaagcgactgagcatccactcgtcgtgcccgcctcctccttatgctcgcgcggtcacatccagctcgcccgctggagcgcctcctgacggcacggcgctctgcgcgttcttcctcgcgatcacgcggaagctgtggccaccgccgatcaccgcttccgtgtcgccgtggtggggcacaacagcatctacgcccacggcgcaccgtgacctgtcttcttcctcgcgctccagtcctctgccatgcactcctagccgcttgccatccgtccctgcgtcgtgcttaaaaaaaactgaaccgagatatttacaaattgtaaattacaatagcccgattttcataccttactatcgctgtccggaatgaataagtgggcgctgattggcacaagtgattttatgtttcgccagtgtgtctctattgcaggtttgacaggtttccggattccggtccggaatctggcaattactgctgtttcttcggtgcatacaaatatcaagtgtgtagatttgagtatttgtttccttcaattgacaatatacatcgactaaaactacggtgagtatattattcggcatcaggacctgaggttgtacacaacttcgccttcccttttttttacttttcgaggcttcgtatcgcccatctgcagttggctggagtccccattcttacctgcggacttcagttcctgtattaacttacttagggcaatgacataggtggtccaccggtgtgatcggtattcccaaatcattttttagagtagagagtcgagctggaatcgggcacgctccactctattgctaatggaacaacgatatcattgtgctcaggcattcgggccgtatcgctttccaagaggcttcgcgccgcaagcaagaggctctgtgttcaaatttaaaagctttggaaaaacacaacaacagcaatgccagcagtctgctggaagcagatttctatgatgcactcaagtttcattgcacttgattcgcaggaccgtattagacggagcaactctatctctattcagcgctttaatttactagagtacacatacggtatgatcaaaatttacgccatgaacgaaatggatacatagtatagtatatattacttcacgaagtatagtacttcgtgaagtaatatacacagccgaaatttgctcaatctcagccgcttcctattccacgcggacagcgcgacacttttccgacggggtcgaccacaacaggctctccatgcaggcttcggtgcgaagagctcaagctggagctgggcaaggcgcagccattcgtgccaccaagaagcagcgacgcgagtccgaagacgacgagctggtactctcaactcgcgatgggccatcgagcagcaagacgaagcttcgactgaccgccacgcacaaactccgtctgatgcgagcgcaggttacggccactgagtacgagctccgctgtctccagtccaagtgggccaagcacatcccggacgcgcgcacacgggtcatggctcaacgctgcgccttggagaagtacgcggccaaacagagcaacgaagagcaccgagagctcaaagagctgtatcaaaagcaccagtttctgctggcctcgctacagacggccgtcctgcgaaataccctgcagtccagcggcagtgacatactcaaggagctccatttcgacacgcggctaggccgcgacccagagcagcgcaagcggatgctgatagaacacaacagacgatcgtctgcgacggtgccttccatcgtggagaagttctcgcaaatggccatcgacgcgaagcagaaggagactggtaaggcgatgctgccgctgtctcaaatcagcgtaaccggctgcgcggactgcacgctggtgtcgagcgtcttcgtgtcggaaatcccgcacccatcgctcgaggaagtgttcgcggctgcgcggtcgtacttcgagacgtttcctgccatgatcaagcaccactttggggccgaggcaagcgtggaaacgttggacagagttaacgcgccggtgacgtacgcgcggctaaactacgacggagcgacgaataggcaactgcctgcaagtgtgaaccatgtcggatgctttgaactgacaccaaactacggcatgatcttcatggatgccatcacggaggacgcgttgtatccggtgccgagtacgaatgcgctgcagtacgggatgtgtgctctcacagtcacgcccctcagggacccgagcattggcaagaccgtgtccgtgaggctgcgctgggttgtgttgtaccgctacaagttgtcaccaagcgaccctgcactcaagaacgacctggagaccaaccgccccatttttaatggcgatctgatcacgtccgctatctgtagttacctgcaagggcaacaatcgcaaaggtagcaccgcaagcagtcatcaattatatgcgcaaactgtaacctacaattccattgtgtactgattcccctgcttcgtgataagcgcacttaagcttgcagtatgaacattgcttcctttggcgtttgcgggaatatcaggctgagagttattactctgagaatcaagtcttgcaacgtcggggatgccactcccttgagcttgatcgcgaaaaaaacagctcacttgcggcgctatccagaaagtaatgttcatcagtgtcgagcatcttctctcgtaggtttcttatacaccattgaaaatactatgaagtttgtacaagactctttacttaaaatactatgaagtttgtacaagactctttacttagtaccgtacctcacacaaagattactttgggtgtagcgcgtttggcactcttgttgccatttgctagaaaggcaaatatgcattcttcatgttaaaatgtagctccgtcatttcaaaagctagaaaatgatctactcaaggctcagctgtctgactcaagaggagggaattgtaaacctcgttggcttgcagttggcccatgtgctcttggaaaagctcgttatccccttggttcccgacgtcgtaagttacgactttgccgaatctcaatgtcgtataatacgacatagctcgattaacaatagcatttggctcgaaacgagattgcaatactttaatcaagtctattttcgtcggcaaaagtataagcaagagaggtaaaaatcagaattgcacaaaaacacggatatagagctgtcatcagagatgggttgtgcataagccggggctggctaatgggacattttgtatagagaaagacgagcatccccttttaaccccttcgtgagcaagtcactaagtatactatacaaactcaaggtacttgaaaatcaaagggggcattctgctccgttcgagcatgtagccatccctgcctcttgttgggtacacaaatggaacagggcaaaatgccaggacaaaccttgcgtcttgataggccaaaacaaaatctttatggagggtcgcctcgctgaaagggcgcaagcctcacgcgattgactggggttgcagaggaaacggcaccttgcttcgacggaagctgatctggaaagagttggactacgaatatcttcgctatatcttacgagggatgcgcttgtttgaaagtatccgaaggtgtcgtcgaaggtagtgccaggttggcatgcacgttgtagtgggtacatgtaaaacaagtaaaaggcgcttgttgtacatgtaaaagctttctgccaggtggggcgaccgaaggccacgatgttgccgtgtcaggctctattggtaacattgatgaacttgagcgagcccttatcctgaagtctacgctactcagtgtggattacggttggtcaacagctgcgatgagttgaacgcccgtacgttggagatcgactgaacgaacctgacctgttaggggatacacctcctgcgccgctcaagcctgtgcaaacgtcgacaacgatccgtccatccgacggtacagctcccgctaagcttgcacgtcttcacgcagctcgtgtgggcatgctccaagccgatattttcagggcatgacctatccatataatatcaaatctactactatttgtgctgtaaagcttgaatttctgctgaacaccactcggtcatgtacactaacactgctgtgttgcgtcatggtgggaaacggtgccgacgtcggatactatgaatatacatgtacttcaatgtgggcactcagtagagaactggtgccaagcaagcaatatttgtacgatccaaacttctacgtatcattttcattcacatttaccagatttttgcctaataccattgcgctcaatagtaaatctaccactctcacgacccaaagcatgttggtaagagtgaagcaccatgtcgccattgctgaagcacgatgttggcgtagggttcgagtagcgtcccatccatgctatcgtcgagcgtggcgtctgtatctaggttcggcatcatgccccccttgcggtcgtcaaccgtggcgtccgatcagcgtgcccaccttgccagctccgagcatggcgtccaggtcagggtccggcatcatgccctcccagcgtgccgaccgagcgtggcatccacgtcggggtacacaaacgtgccgaccatgccgtggtcgcgcgtggcgtccacgccgggttccgccatcgtgccgtcgagcgtggcgtccttgtcggggtccggtagcatgccgacagtgcagttgtccagcgtggcgtcaacgccggggtctggcagcgtgcccgtcgcgcagttgtccagtgtggcgtcaagtagcatgccgacagtgcagttgtccagcgtggcgtccacgtcgggtccggcagcgtgtcgacagtgcagttgtccagcgtggcgtccacgtcgggtccggcagcgtgccgtccgtgctggcgtcgagcgtggcgtccgtgtcggggttcggcagcatgctctccgtgccgtcagcgtggcgggctgcaggtattttacaaaactacgtgactaatgtttcatttgtaggcactgggtcgggatgaccacaaaacgcatacctatcggcgtcggtggcgacgggcgagtccgacccaacgacactaatcccaagcaataatgggtttattagcatataagaatggaagtctggctgcgctgcggtcaagactcgcaacttcatagaaagaggtgctagtctttcgaagtaagtgatttggtaaccaggttggaccagaagaaccgctgtacacgtctctgcgatgttgcatagcgcggaaatgccaatcgggttgcgctaacctgagtagtcacaacctgctcatgttagcgcaactcggctgacatgatcgcgcggtttaggtacccacgggatgccaatctagactaaaaagtaagtaggggtttggtgggcatcataagatcaccaaatcacgatgcccacaacggtgtagacctcagctaagtagccatcgtgatgactacgacatcagacggctaacacaggtttatacgcgattgatacgcattgtttcagatttgaatttaatctgtactgattgagtacgtaatcctgagtacatagtaagttggtatagcgggcatgattggcccttccaccaagcgctacggtcacattaatgcagtgttctcacagcgctacgtcggtcacaactgccccgaggccgtgtggccaggtggtagcgaccaggttacattacgtggtgggaaaatgccacctgcagcggtcagtaagtagtgtagggaaggtgccgatgcacgcgtggggtgcgggtgtggtgggcactcgtcgctgcattacctaaagcacgggcgcctgtatcatgagctctgcgatcccccatgatcgtagcggcggggtgctttcacgtgctgcgcttgtttcggacttgggtgcaaatctgggtcgtgctcgggtcgttggggccaacagcccatgcctgttcacggccgcgacgagccaaacgtgtgaggacttcagttgaagcagacactcgtcgatctcggcgatggtggtctagagctattccgtgggctgcgggcgcaccacgacgcggcacgagcggaactactgagggtggcgctagtacgcgtagaaccacgtctggaatatgaactagaatgtacgcaatggcgccaaggcctcgcaggccatccccctccattttgccagcatctgaacgattttttaggggtactaattggtgttgaagttaaagtaggatgcgccaagctgagcccaggctattttcctttgggctcgctttttcggctttttcgtgttgtgattggcggagatctgcattgccgtcgcgtaattggcggaatcctgcgtggtgcgcgcgtgattggcggaactgtagaccgtcatgtgattggacgacgcaaagatcgcgccagcagaccccccccccccgcgcgcagttttgaaattcgcggcttcgagttcactttccattttgcgagccgctacccagctccgtcaacaaacctcgccgacaagaggtatgctgctggaccccgccacggacgccacgctcgccgacggctagggcggcatgctgcggcccgccacgctgacggcacggagagcatgctgccgaaccccgacacggacgccacgctcgacgccagcacggacggcacgctgccggacccgacgtggacgccacgctggacaactgcactgtcggcatgctaccggaccccgacacggacgccacgctggacaactgcactgtcgacacgctgccagaccccagcgttgacgccacgctggacaactgcactgtcggcacgctgccggacccgacatggacgccatgctcgacgactgcactgtcggcatactgccggactccgctcctggatgacagcacgctcggtggaatccaccgccgaggtgaagccaattgacggccagggcgacttgctgctcgactcccgctcgacaacgactcggagggcctgcttacaaagcccaacgggggtggcacgcttgacgaccgcacgcacggcatgttggcggaccccgccgcggacgttatgctcgcggacctccccgcggacgtcatgctagttgatggcaaggccgatctggtgtcggccccctgctcattagactgcacggatggtatggtgcgaattctattgcggtcggcacgctgggcgactgctgctgccgatcgcgacgccaacggcaagcttgactcggtagggcggcataccgggccataagccgacaccacacttgccacgattgatgatggcattacccgcatcctgccgtcgaccatcgacggcgccctggttgagctacgtcgcaaagtattactactagtattgaacttatctgagacgagtcggttaaatatgctgtaagatattttattagttaaccaccatggtagctgacactactactatcacttcaactactacttgtaacactcgtaaaaatgttactatcgataaagatatccatactattagccgtaatatccagagaacacatctcgctgtggagattgctgctcttctccgtagatcagtcaagttgccacacgcgtcaaacatgccctccataagcttttcttggtaatgatgtactagttactagtagacgttggtgaggcaagcctcgggcttgagaggtcttttgcgggtagagctgggaatatgactcaaacaacagcgcctttcggctcatctggccgagcctgcgccaaactttcagcaaaattcagtgcacatcgccagcgatcacaaactcctgctactatcacgaactccggccgctagtgaatcgacgggaaaagcagcctgcttcgcgtgtgcacgctgcttagcagcatgcatctttcaacgataagtactgtactactgtaatactactgtagtacatgtacccgagcgggaagttgaacttcagatcttcaacggacgcggcaagatattgcgtaagtttcatcagctttaacgggtttcaaactgttttcacagggaggcggcagcattacccctagccttacccgaacctcccgcgatatgactggccaaaattgaaaaggtgcagttgagcgacgcttcgactcgatcgggcgtttggggcagaatgccccggttgcacacgaaagggttaaggtttgcgcgagtgcccacattcaagcaaacacaacagcgaccttgaaggggagagtacggcgtatgcggctgtcaagagctcccacgagctcgtagaatagcttctaaacgcccgaacacacaataaacaagtaaatgataaaaaccatggatggaatggcgcctaaataactctccaagggctgttgctgctatttcctcgagtttaggtgccgaatatacaaagtaagtataaccggaagtagactatgtctgccgagacttctaacacgaagaaatatttatttgcagccttataacaactgtacggtgtagctggttttggcagcgacagtgttgcagcgtatttcgcgccacgtaaatgccggattggaagcaagggcatggagtagtgagtaaataaccttgatcgtgcgtatattccacaatgacctctcccaataactaaactaagatgacgagagtatcctactactaaccaacttaagcacgacgtatacttcggtttcaccgggaacgacggaggtctggctcgtacgcgtgtcatcaactagtcaatccggtcgtaactccttatttgtgcgtatagagatcctcttcggctgttttgacagtctccctgtacgaggcgatttctatagtacgcgaagcccgagtgccgctaccggtgcggccaccctcgagagcagcatcaatatacctgctgcgaattagaataaccgtggtaggcttaaactttttctaggaacggtaaaacgaagcaatttcggcattgcttcagtgttccggattgagaaaagccgtcggtgtaggccgttgcctcggcaacaacactctatagaaatgggcgagctgtagggcctatatcgtaaagctgacaaacaaagcgatgaagtgaagctgcttctacggttatagaactgttttagcactgacatacaaagtaagtcagcactccaagtacccctttgttggttgtagtgattacccatttttcttgaatgggatacggttccccattacctgacctgtgcataagtgagagagaaaatgttttgattggctatatatcgatgatttggtgattacaacctcgcagtcatctatcaacaccgcgaaagatggatgttttgtgtagttcgccaatcctattgatccaccatacgttcaatgtcgtaagttccggcgtacttggcgtcgttttcgactcttatgtcgtaagttccccccatagatctctacaatctaatatgtctgatggggcttctcttgttgcggacagggcgcgccaatacaaactcgtagttacttttttcgtcgtaagttacgacgtacagtaccgtagattacgtgtttcggtgcctaaatcccgggacccaaggggttaactgtgaatacgcctctggcgagtcatcgctgttcagccttttcactctggcctcaatggcaaagtggtgcttcatccaagccgggatcgagtcgaaatgcgccatcgcagccgcgaacactcgctcaagcgatgggtgggggatttccgacacgaagacgctcgacacaagggtgcagtcttcgcagccagtgatgtcaatttgggaaagcggcattccggtctgacctgacttcttctgccccgcgagcgccttgtcgatcaatttctccacgatagaaggcatcgtcgcaagtgatcgcctattgtgctctaccaacattttttcacgttcgtctgggttgcggcctagtcgaatgtcgaagtggagttccttaggatgtcgcgtccattggaatgcagggagttccgcaggacggctgtctggagcgagactagcaggaactgctgctgttggaacatctcttgaagttcttggtgcactttgtcgctctgtttggcggcgtacttctcgagcgaacagcgttgtgctgtatcccgcgtgcatgcgtcgggtacctgctgagtccacttggactggagacagtgaagttcacattccatagctgccacgagtgctctcatcatgcgaaccttgtgggtgttggtgagtcttggcttggtgctctggagtccgtcacgagcttgactaattgttgcgagggagatgatggtctggtcgtctatgggattccgtcgacgcttcttggacgcttgatactcggtactttgctcgtgagctcttggagtcgagttgggaggtagaccacagtccattgatgatgaagtgaagaagtgtggacaagtacatgtacgagagtgagggccaaggtggcacgtccatcggtgacctgccgccaccagtttactggtagctgttgagcttcaacttgacgctaacatttgagtgttgttgagcctctgcaagtgcgtttgcatctgtataaatgcccgtcatgtgatcgtgtcatgctagcagttgagctgtgtaggccataaacaacatgtgaccccaatgttcacgattgtatagaggaccgactagcgctctgggcacccgctacgcgggcgctttgaccacgggttgctggaatagcatagcttaaaagtatatgcatcattttgatttccataacaataatgtgcggatacagttgacacatattcgttgctataacttcgtgctttagtagcaaatgagtaggaatacattttcctattaagctaattaccaaatgtcgctcacgatgcaaagttgagtacctaaacatcgagtgagctgaatatcgttgccgttgtattattgatcacccgtttctgtgaggcgagctacattgtcacggacatgccttactacagtgtagtgacctgcgtgtttacttactttgaagtaacaactaaagtattgaaactatgattgggtgtggtttatactgcgttgcaaactggtagctgtcgtcgataccgtactctagtgttgttactacgttagcactgaaagactgcaactttgccagcatgaatttacgcactgcaccgcgctacatgtagttatgctggtttgcgcgataacagttcaaatagacatagcaaatttagctcaactcaatacggatcggtagcgactgtgcatcttcgatggttaggttgttgtgtatcgtgtgtatgcatatgaagcgtttggcgggaccccggggtccccgcttgtgtcataagcaaccggtatattcggtaaattcaagtgctgcatgtttgaatcgaacctatgtatctctggtagtatcgacaatcgagttgcacagagctgcagagttcgcaactttgcgtgcccgacgccgctgctgctgtagtaggcgctagcttctagcagtcagcttgaatcttcttggtcgtatcttcaccaagacgcttaacagaacgaacgaatgcagcagctttgtggtcacgacgatttcaatacttaagtatcacgtttgagccgaggaacctctgcacctccagttcgcctagacttcatactggatgctagatgcttgaaggtgaaatgagctctagctaaactcgaaaaattatcacaaaattgtcacaacatatatattatcactgccccgccgataaaaataaataattccggtcgccatcggtacatgatgcgggaccccggggtccggccaatagcttcatatatatattgctctaacgacaatgtctacactaacctgcattatgtgcatgctgcagtagtttacggtacacgtatctagggtagcagcgcgcatttattttgaaagctgcatgcgttgccagtgtcactactattctacgctttgcctactctgcatctttcatctggatttataacgcgtcattgctcttggtgcatggcgtacagtacttagtaacagtaattcgaaattgcgcacgaccatgctgttgtgcgctgcgcgcaattcgagcagcattttctaaaattgttttgttgaagcgagagagttacggcacctgggatatgatcgattttgatttgagttggagtgcattgttgtcacttggctgatgcgactatcgttcctatggaagcgagtgtcggactgcagcaagatcctgccattaatcagcttaataaaaaacataaaaagtcgtaagtatgacgcctcgatgcgcgcgctggtgatgcacctggatttacttaattcgaccaactactacgtagtagtaacttaagttgagcacgcgactactcaaatgggtgtattataatgcttgattcctgcaaatgaatacagcacgattgccagctacaccacgccgcgtgctgtttatcagttaatctatgtgcaacgttaggtggtctaaatgcgtcgttcgcacacattcttggtgtactagaagatgaacgcctaataagcaccagtctacccctaattccgtactgtaaaccctcgactaccagttatcccaacaggcggaactcccgaaaccgtaatgtagtttatttatgtagatgtatgcatctactcactgtagtagtgtctgctgccgctgcactccgctgctcactcccgtacgccacgcgccctcccgctcgcttcctcggtccgttcgttcgccgcgcgcaaactttcaaaatgggggatgtgataatcacacccgttaaagtccgattatttccgcataagtacgatttttagcgtgattgtgtctagttttgtaatttcgtagatagttaaaaagccagttccagtcgacttgatgagtgaataatgtatgcaataaggccgcagtagcgtagtctaattgacaggtctaggctgtaggggcggaaagcgtgcgcgatgaccgacagacaggattctcggttagaggacggagaatgcgaatcgtagggaatcgagtgcgaagtctctgtcctggctgcgcttttgtttatcgataggatacagtccaaatgtggagaggagccgtacatgtattacactaccacggtatctactattgtgccttgcatgctttctgtctaaacaacgacgtaattcgttgttttagcaaatcacggtgattagcccatcgttgagttaggaggctaactcgtcgatttaagatagaatagctgctattgccgcttgcaaatactttgtcctctaaaatagacctctaaaatagaccacgcctgtctcttaatacgagtggacacgagcttttaggcccagaaactcggtttggcctgtctggaatggcatttctgcgtttccaagccgcagaaaagcgttttggtcgggaaaacagagcctcaagcttggatgttagaccgtactggcgagatatataaatcagacctaggtcttaattaagagctgactggattaaaaccgagattattaacgaaataataagcatgcgttggccaaaatatctgcaaacggcaataagacaacgagttaacgttgagttatgctcactttcgttgaatggctggagtaaatccgacaatactacggccctggcattctaattctaactcgctcgctttgtctgattgctttctagtcgatgattgacatgcgttggcgatctatcgtagtactaaactacgtctacaattttgaagaacatccctgtttttatatcgaggagctgcaagcagctttaaagtcagcgtttcctgcacttccaaacatttctagtagaaattttatactgctactatatgccgtgctctgaaattcgagctttgtttaacgcgcaaggccacgacgaagagagcgaaagaaaacgtccccgccgaaatcggtgcttactattatgcaaggagttggcgccattctatcggggaccttctcggtttgttttcttgcagcgacaaccgatttattcttgcagtggcaaccgctccgttcttactctgcgttgtgcttggtactggcggttgattagcttaactttaacttagttaggctgcgagatatgatcaccgggaaggatttgctcgttggtttagagcccttaatcgcatgccaaagttcgtgcaaaccacaatacagtaaacgtagtagtattgtggaaaccgattagattgtctaattgggatataaatcggttgataaagcagatgattaagcttaatcgggtctgatttgctaaatccgacctcctaattagatcgacagactaagatttgtactctgatttgacagagcggtcagttgtgcctacaacgccatgtggcaagctgatttagctgctccacggcttacaaaacccgggacggctgatttgcatgctaatcagcccgaatgtccgacacccacacggcattcggtggccgatttaacgtaaaaccgacaaacgctaatgctgacgagaaatgacagcgcaaatacatgacttcagaacttgataaatagatagcagtacacatcgaagctcacagaagcgtatttaatacacgcgatgctatttctcgttagtaggtaccggtacgcgaatcactcagctcgtggcggtaagtggtcgctcgtcgtatttctggcaggtaatgaggcaacccccattttattaaccttacaccgatttatacccttaccaatgccatatgaaatcataaggatccccgatttagtaccagtcaaatctctcatgaacgctgctttatcagctaatccgctcgggcaatctaatcggtttccacaatacatgaagtaccgtcaattgagccggtgcggctgtcgaacattcagtgactaagactgggtttacaagaagacgtgagtatgacgggctggcgtaagccttgaagcacacaatgtgtcatgttatagagcatctcacgtaaatctatgcgcacttcgacccagaaaactctgaaatgttgctacaagtcgtattagccacaattatgctgtagtcgtgtgcgataattcctaggctaggaatgaaagacacatttttgagaagcacacaacatttatacttgacagggtagtttttctctgtacaatgttagccgtacgcttgatagattttcacagcttcgccagtttggcgggctatggtatccggtagctgtatcgagctaaacgccaacatcataagaggcgtcagcgagacctgatcattcgccaccgctttggatgtgagccattacgtgagatctgagcacaaaacagaattccccgtccaagatccttgagatcgccctagaagctgaatgcaaacaatgctccggagactccacagtgtcgcgttgctcggctgtcgcagtgactcgaaggtcgccaacgtcgcggacatcgataccgtacctcacagaaagaatgttaagctttgaagagactgggttgatcgcaaccatgaaccacgtcgtgtgttcaaatttaacagcgcaccacggcatgatctacatggacgctatcactgaaggcccgctgcatccagtgcccactaccaacccgctgcacttcggaatctgtgctctcaccatcacgcccaacagtgagcccaatgcaggcgtgacgctgcggtgggttgtcttgtaccgctacaacttgatgccggatgaccctgcgctcaagagcgacctggagctcagtcgtccaatcctcaatggcgacttgatcacgtccgcaatttgtagttatctccagatgcagcaatcccgttcacaggtgcagcgctccgcctagagagtactgccaaacctccttcttccattataatataggccccttgctgacatctaatccttgaatccatccagcgcatgatcttgcattcactcttcaattcatgtttcaagcagcggcatcagcgccgcctttgcatcgctccatctactgtacaatgtgagcacgcctaagcttgcagcgtgaaggctgcttccttcggtgtttgcgggaagaggaacttcagtacgttgacgctgagaatcaactcctgcagcgtcgggaatgtcacgccgttgccttcagcagcaccactattcgcccctccttggagtgcaacgaaccagtctccacgttctggctgccagttcaccggcacgaattgtacgcattggtcgtcgcgcacgtacacgataacgatgcagcgcatacgcgtctcactgaaccgcagtagaaacgtccctggaggagcgctctcgagcatactgacacaggcacctttggacaggaacccatgcagcaaacgcggctccgtgtgcggccatagtgtcgagtacaagacgcagtcaacaagcgggcggaaccatccccagaacgcagcgaacatgcgcaaactcactgccccaccgcgttgagcaggtgcaatgccctcgcggccccagatgagcgagctcttgctcaggaaatcgatgctacgcgtagacaaaggacgcctcgcagcgtctcccttgagcttggtcgcgaagaaacagctcacttgcggcgctatccagtccagagggatgtccttcagctcttgtaattgacgcactacagccgctgagtagctgtctcttgaccctccgtcagggttaagactcggaagggtagcattgatgaccacagctcgagcccaaaccaagctgccgccttcactctgaataatgggtctcacgtgatccgctaccttaagcaggcagagctgctgaagcgaagttgtcggctctgtgattgcaccggtgagacttggctcgctccgcgacgatacaagtgtatggctgctggctggtggaaagccgagcgcgtcgccactgttgcttttcgcttgttgacctgttgacagtcctaaaggagatttggctgtgaaaatatccgagtgggatgcaacgggtttcattcggcgcagtgcagactcgtgcgtgcttgcaccgtgtagtcgatgctggtatttcatcccctcctcgatacaagatgggagtccatgcccatggtggtgatggtgatgatggtgctcgtgagaatgagagtagcaaccatcaacagattgtgtccgcgctagagcatgcactccctggtcgtgtcgcagctccaagctgcaatcaggagccgcagcaccgcccaacttgctcatagataaccccgtgttgaccgatgggatgatgtagctcaggaactcgtgctgatccagctccatatctttattctccaagaactgcgagacctaaaatccacataaagaaatgttaggacagcttcgatacataaccaacagcaaaccaagctaaacgtaccccgcagatcgtccgtggatgaccacgtaggctcttgataatggggtgctcgccaaatgcttcgagatcggtactaccgcccatttcatgagcctttatcttcctcggagctcgaagggtgaacagcagcgcagcgtcagccggtggaagtggcccaacaggaatgatcttttcacccacgccgtccatcaccccaaacttcccatcgcccgtcagcagaagcgcgagtgagttgacgcgacgcagtaacatcgcaacgatagcacggaacctcgagttcagtcgatgtgcacgattacatccatccaaaatcaagagaaaactgcttccgtcgccctgagtctctgtctcgcaacattgtcgtgcctgctcggccagttcatcgagggatgccgcttgaagccccaagcacttggcaaactttcccacaagcaccgcgggttcaagatcagcgtgctgcttacacgccttgtcactcggcccctctccttcgtcgtccgtgctcagtctaagataaaatatgtggctgaacactcgacgctcagtggcgtactgggcgcactgcagcgccacctccgtcttgccgatcccgcgctctccagtgatgctcacgagccgcgctccttcgaccagcgacttgaacacttggtgcacttccagtgatctcccgacaaaaacttcggccacagcatcgcactcgttcaccgtcaccttccctcctctcctgccgcctatgtcggtctccacacagtcacccaccggcacatctctaaagggtgcgtcgttgtggtctccgtcgcctaacaatttgaactccgaccgtcctccaagtcccaccccactcccgttgctcgtcactgcaatgtccgcctgcactcgtccgatctggaaactcttggccactgagtggcctgcaaacagcgccgtgtagaacgctttggcgaactccatggccttgcggtccagcaccttctcctccttcgagaccaccacgacatggggcaccccggcactcacgaaagcttgggccacactctccgagtgacacgcgctcacgaacaccaactgcaacggaactctgggccgcggaggcgggtccaaggccacccagcctcgttcaaccctgtgacttgtgaaggagagccccgacgtagcatcatcatcgctgctgtaactagaacttgaactagaactggatccagaacttgaactagaactggaacttgattcgctttcagaactagattcggcacttttacgtcgtcgattctgtctctggcgtatctttttgtcgcgtcggcgtctcgggcgacggctctcagcgccccccgccagcaacaggtcctgcagctccttctgcgagacgaactgcgcctcgcccttgcgcgtctcgaagatcacctggcccggcacgccgtggcccgagaagtgcagcgcacgacatccaaacgacaaaaccttgcggaacgcgtgcaggtccgccacctccgagtgccaggccagccgccgtccgctctcgcgcagcgtctgcagcagcagccggcgctccgccttcacgtcgatgagctccacggcctccaggccgctggacgagccgttctcgcccgcgtgggggctgaggctgcgccagttggcgcccgcacggcgccgtaccaccagcggagacgagtgcaggtgcgcgaatatcggcgctggcatgcgactcagattgtggcgttgaaataggtcgattatgggcgtaggttgtgtcgtgagtgtcaaagttgaagattcgtctacaacaggctggacacgcgagacttgcatggatcacgcgctccagacttcagaaatcaagtgccctcgagtcttttctgcttcgtgctcgatctgtgcagcggctccagcgtcttcgtctcgagctcgagtcgatggagctgcatcaagagcgaggcgacttcatctaccatccgtatttactgcgtgagatcgatgaacagcggtgacagttgggtgtagctttggctggcagcgtgagttgtaagcgatatgctgtcgggtcctggaggtacagccgaggagtaaggtatcatcggccatgcattgccgtgggtattgattgtggcaacgcatgtcaacagagctctaaaattatttggttgaataagctcttagacatcaaatttcggggccctcagccactgcacactgcatggggctctccaggctagtcctcggtatcaaaaggaataaagaaaactccttaagctgtttattagcacaacaacacagggatccccttcgatcactttttaccctgtaacttcgcccattttgcgctccaagtgagcttgcactatgcgagggctatgacgagcaggcgtagagcggcggtaatggcgatcttagtgcatcgtggctcgatagcgctgagcagcgtcgtcacgcatcaccgcccgcgcaatggcgagatccattaaaatgccggcttctcaccagccgatagaaggctcacatcgtgcaattcattccagcgccaccatcccgcgcgtggaatctcgagcgccgcgagcgaatctgccagcgacgctcgcggcaattttcaagctcgcgcgccgcatgagacagcgccaactcgaagcagcgactggccagctgctctcgatttctgaagtttgcggcccgtcagtctgggctctgacggtcagagctctcccattggctgcgcgtgatccatgcgattgagtctgcaaggatgcgtgtcctccctcgttccaggccagaagtccgtgattggcgtggcagaccacaaaatagcgccgtctttccgacacggacagacttgctccaagtatgccgcggccgccccaaagacggcgccattcgcagcagcacctccggacagcaacgcacgaaacgctgccaggccagttgactaattgaccgcgacaccccaagcgtttagtacccataccatcccgtaccatgcgacgagtcggttgcacgctgctggaggcctcgggccgccgcgccctgacgcgtccgcggcctctgcccgcagcgctgagccgcgcgttcgcctcggtctcgcgcgcgcacgagagcgagaacaacacgcagctgtcgtcgggccacgccgccaagcacgcgaatgacagccacgcgcaccaccaccaccactacctgtactaccacagcagcagccaacacggagctgccggtgctgcgactgagggagaggacgcagacgctgcgtgggctgccagccaccagcagcagcatcaggagcaggaggtgaaggacacgagctccttctcccgcgagttcgagaagccccgcatggacgccaccttcctcgtgaacaactacacggcgccggcgctggcggctgcgtaccaggacagagagtacacgctctggctgtgcgccgagctgctgagcgagggcaagctggacgaactggaggcggtgctgaagccataccacggtacgtcaatgatctgcttctcttcttgtctaggtactactgccgaacctgacgcagactcttcttcttctctattcagactttgctcagcacgacatgaacgcacagaggagtacgccccttgcaaaggcgttcggccagcgccacctcgagcgcatccgcaagcggttaagccgcctgccccgacagatcaccaaggcctactcagcgcgcgcggccgtggtcatcccgctgtgcacgttcgagggcgagccgtccgtgctcttcacattgcgctcgctcaccgtcggcaagcacaagggcgaggtctgcttccccggaggcatggtcgaccccaccgactcttgcattgaaggcacgtgtctgcgcgagatgaacgaggaggtggggctggcgcctcagggcgtggatgtgctgggcgtgctgcgctgcgactggtccagcgtcacgtcgatcacgggcattgccgtcacgccggtcgtgggcttcatcggcgagatgagcgaccagaccgtcgccatcaacgagcaggaggtggagtcgctcttcacagtgccgctacgcgacctcatgaaccaggacaactgggttcgccacagcaacgccactccggtcttcacgggcggcccgcacgtgatctgggggctcacagcttatctgctggacatctgcctgtccgaagtgctgaagatcagcgactaacgaatgcatcaacggaagcaaatgcgagagaaaatatatatgaattctgtacacacccatactttccccacgagtgttttaaagctcttgcggcccccttggagctaccggtgctggttcgttatagatatcaaaactgcatgttactgttagtgttgggcgtagtagccctgggaaggctggacggcaggctgcggctggtagtagccgccgggtacgaccaagaccggctgcagcgattgctcgtgccgggacgcgcgtttgcgtcggcagatgcagcggaagagatacgtcacgaccgcaatgatgaagaagaaggccaatacgcccagcacgattgccaggatcgtcacgaggtggctcttgtcatcactggataaagtgccggaggtgccatcgctgccgctgccaaagccgccgccgcctgtgttgtcaccggacgaatccgacgacgccggcaaggaaaccgcttgagacccgggtgtgcacgtgctgttctccacgcagtagaacgtcaccgactcgttgacgttgtagctcgtgtagaaggtcttcagaaaagtttctccgatgatccaagtgttggcgtacgagccgctgctgctcgacgtggcttgcacttccaccacgaccatgtttgcgcccaggtcgataatgtagtcgtccttctccagatagaaggtcacgtctccgaacgtgagcgcaagtcggggcagatccacgtcactcgagcacatgtagatctccgatccggacgaatactgctgacaccccgacaagtacgtactcacaaagtccgagtacacggagctgggcatcgccagcagcgacgtgcccgagtccacaatactgtcacagcttccactgctggcggtcgagcacgggaacactgcggagttgttgccgatctgcatggccgtcatgccgatcgtccagtgcgtgggcgtggacgacttgaggtccacagtgtacggcatgagcccgttggacgagatgagctcgtcgtctacgccgttgagcagtaggaagctgccgtccgagttgtcctccttggtcaggtacatggagaagctcgtgacgtagtcgatgaactggccgccgggcgatggaagtgtcgccagcgagccgtaggccaggccgaagaggccctcggcgtcgcccgccagcagcgagctggagctgctcgggttcacgttgctgccctgcgccacgcccacgacgtagtcggacacggccacgttgccgaacttgatgtcggccgacgtgccctcgacgcagacgtcgcccgagccgtacgagatggtgctggcgtccgaggggcacgtggacgagcacgtcgagccgctgaggtagtagcacgagatccagaggtcggacgagcccgtgtccacctgcaccacgaaggtcgagccgtccaccacgatgtccgcgaagtagatggtgccctggtagttctccatgtccacggcgttcgagttgctggcgctgctggccaggcggcgagagcgcgtccagggcgactgcccgcgccgcatgggcaccttggccaccgccttggacgtcgtcatggctactgagaacaagtcttgctgccttggggcggattagatagtcaaagtggggtgggatatgctggagactgggagaccgtgtccacttccaagtcgcaagtgtctaaacaatcgggcgccgattttggaatggaactgctgaatgtcggtcggtcggtgggcagctagctctgcgacagcctgcacttggcttcagtatggggcggccctgctacctccggcgcgctcagctgagcttgatgcgggcgcgctgcaggagatgccggcgttggccctcgattttctctatgagtgcattttgctcgcggtgtcctgcgccccgggcgtgacgtttgctggcttttcacgcggcgacatagtgaacgcgagtcagagagcatagcacgggcgcagacaactgtcggctggaaaaatggacgcatcttataacatgtgatgtcagagaacaccgttatatagagggatagtactgcgaattgatatcggaatgttcggttcaggtactattgcaatatcagtttaaacagatcctttttgacagcgacgtaatcgcgctgcgacgttttgatcgactgctcgaaactcaaaatcgatcagcggagacccgcggacgagctctatgcagacgccaccttggccgcttgtcgggtcggctgtgccattgtcgacgttgctccagtcgtgcgcgtcgtttgttgccgtctcgacggaggccctgctgcttgtgccagggcactgtcacctcgaagtggtcttgtacccagtgcttgtgtacacacccagcaggatgacgcacctgatttaggtcgcgggtgtgtgacactcggttgcggttgcctttcaacttgcccttttgcaatgttatctctgcacggacaagtcgccgagctggcatcacggtactggtcaagctcggtcgtgcaggtttcgtgtagatttcgtcgtcacctacgctgtctttgtgaaacggagtcctcgtaggatttggaccagttgcattcaattcgtattttttaatcaggatacaaccttcaacgcagctgcatgtactcaacttgagcatcgtcctcgctacaggtattcagtttccttcgttctggcgtgatgtttggtacacattcatgaaaacctaggacggccgcagtcgagctccccgcagcatcgacgattgcaaaaccaaacgcgtcaggcatgtctggagaaggcatggcgtctgtatgtaagtcaacctcgctttgtaattgcgaacgagcttgcagtggtcaccgttgcgcgagagatcactgtcgattgtagcacgactccacaagccagtcgttcggacgatatatgtaggtgaacagtgcccatgcgagtggcaaaacgttggtgtaggtgggtatgatggggctgtagtgcgagtctctaaagcttctttcaaaaaggcattttgaagtcgtcgccctagaatgcatcacgttggagccaacttgacatatgttaagtcacaaacagacacaaacaacgccctctgtctttaaataacgccctccaaatagctatctctcaattgctctccacctcctctcctcgggcgggcagactacctggtgttctcatcctctccatgcagcaagccgccgcgccctccagtggggacggcgacgaagtcgaccgcaaggccaagttgctggcactactggatcgtgcgcgcgtgaaccgcggcctgcagctggagctcaacggcggccaagcggaagcactggacgacagacctccgcccatcaaatccgagccgctgcactcccccagcagccacgcgcagccccaggaccagcaggcgcccaagtgcacgtgcagccacagtcatgacccctctccttctcccagtagcgtccacagtcgagtccccaacgaagatcgaggtcttccagctgcaggacagaggaacggagctaataccatggccaatccagacaatctaaggccgaacggtgcaactgcattggctggatcggtggggaactcacactccatcacggactcagaggcgtcgggagatgtcacaatgatgcaagaggctgatacgcagtccgtggtcaagtctgaggctgctgatgagcctatgcagtcgcgggtcgctgtcctcagctcgacacccaagcctcgcattgccgacttgacgggaggcagcagaggcaacgtcccgaggctgcaacagcttagggctctcgaacagccgagaaatgccacgcaccacactcaacttgaatcacgcgaggagaagcagactgtgaagcgcgagcttcctcctcgagcccagcaaaagcatccccagcggaccaatgcgtcccctactaacactacgacgacgctgaggagcctagcacaactcacacctgacgagtacgaagactcggagctgcatggagacttccagcacatgctgcacattctgatcccatctaatgccaccgctgcgttgctggagcgccgtggccagccgatccagaacatcggccagcaggcggactgcacactgtccatccgcgaaccggaggcctcgccgttcaaggacgatcgactgctccgcatctacgggaaagccaagtgcatcagcttggcccagcggctgatcattgcgtacatccgcgcgtatcgagcggacaagcgcgacccaaactatatcgacctcacggacgagactccaccggtagcactacccgccacatccatcacgaaagccgtgagcgtagctgtgtcgtctgggaagaagcctgagctggagattgcaagtccgttccactggatggtccagcgcgaagacgtagggaagatgatggggcgacagggaagcattctcgcagcaatccgtcgcgatacgggtgccacgatccatgtcgacgaggacgtcgttcccgggaccacagagcgtcgcgtggttctgactggatctgtggactcaatcgctgcagctgtggaggagattaaaagcaaagctggtgggcgtcctgaggtgtcggcgaccgtcgccaatggacgacttggacagtatttcgccatcccgtactacgccgcaggattcctcatcggcccccagggctctacagtcaagcacatcactgagcgcacaggcgcgcgcctacaaattccttccgcggaggatctgcctctaggtagcatcaaccgcatcctccatatgcaaggcacccccaagcagaccgaacacgcacggcgtgtcgtcacggccaaacttcgggactatctggcctctccaaagtgtccgagggcgttgaacccctcttcaaccggtcgcaagggcgacaaagtcaccattaaggttcttctcccctccaggatttgtgggtttatgctggaccagcgcgggaagctgatccatgagatttctgaaaaggctggcgctcacacacatctcttagctccacacgacgacgagaaccgagtttgtgtcttcactggtgacatgagctgcgtgctccgcgcgcagcgcttggtgctgcagcttattgcaggggacgccatctcgtccaagcgcgctgctcctcctcggaaacggaagcgttcacatcgtgaagaagaagaggaggaggaggaggctgacaattatgataccggggctcatgaagatgcttacatcgaggaggaagagccatattatgaagatgatgtcgaggaggaggaggagggctattatgatgaagcgtatgaagaatctcctcgactaccggtcagacggcagactgcacgtcgtcaaccaacccgtcgcccccaacccgactatcactatgacgaggatgaagatatgtacagatatgatgacgacctcgaagaggtcgagtacgaagagcgtccacgtccaccagcacgtcgacggcctgtcagctctcgcccacgcgagtacattgaggatgaatatgacgaggacggatacggccacgactacgatgaacgaatggcttatgaggcgcctccgcctcgagttcctagatggccagtcgctgtgcgtcggcagcctcccactaggcgtcaggacgagtatgctgacgactatgaagagtacgacgactatgcctacgcagatgaaggcggtgctgagtatgagcgaccattgccagtgagaaagcaagtggtaaagaggcgagctgtgggcggccgcggtgatgatcgacgacagcctgttgtacgtcctgctcctggccgaagggttcaaatggtggcgcgaacgccaagccctcgcgatgggcacccaagagtgaaccctggtggccgacgtccccctgcgaccagcggcattcgcagccgaagcgggagcgtgaatacgcgtcacagtgtccctcctcgcggtggaagaggaaatggccgtccgagcgttaatggtcgttcgaatgcaggccgtggcaatggcaacaagaggcgacgccagtgagatgcgtattcccagcaacaaccgcaataacgactgcaataatcagccactcgagtctgcaaaacacacgagaacgttgatattttatcatctattaccgccgggcaagcaatccagcggcggtggctgcagtggcgcacgcgatgaaagacagacccaggtacaatggcgactgcggcggcggctcgaccgcttctttcttcagttcatcgatgggaagctcccgagtccgcggatgttcggcaacgcgccgagctgatcgctccccttccattccatgcaagcgcacgtctggactgttcatctcggtggatccgccaatcgcgcagtgttcattaacatggctgagacgtgaaagcgccgagcgcttgacgactgatggctccgtggctactggtagggagtccactccccgttggcgatcatcatcgactgatttctcttcaaccggcccaagttcactcctcgacagtccagctagcgtcatcggtttattctcaagacttgcatcatcagccggtgtagctgcttgatcgacccaactcagctccagcgccatattccgatgcttcttcccgcccgccgacaaaacttccgctgattttcccgttgaaccaggtctgtcgatgctctcaatctccaatggcggcagtcgagacgatggtgttgtggtagttgactcgatgtcactcccgctgtcgcttttgctactggcgcttgccgtgtaaggtccacggttatcgagcgccaacacatcggcagcagtcatggcggaactcccggtacacatcgtcctgcgcctcctgcttcgcccccggctgccttcagagctcgcctccgctgaggtttggcgacgtagaatcctgttctccaggcgcaaggcggcaacttcgcgcgtggcgtcctccagtaacagctccatgtcatcactttctttctcgcgaggctccgcatgaacttcgctgctgtcccgcgcagagttgccgcctcgttcactgtgctcctgctgacgacgaagtgcgttctccagttgcttctgcaactgctccagagtctcggtgactcgcagcgtctcggcctgggcactcgccgttcggttctctgcaacttgtagctgtgtcgccgcgcgcgccttgctgctttccagcttcgcgacaagttcatcacgcgctgccagccgcgcctggagatcttcgttctccgcttccaaacgacgggcggttcggcgcagcgtatctcgcactgcttgaacgcgctcgacctcttgcgtttgctgctcaagctgcgaggtcacgaattccaggtcctgctgtgcgcgtgcagtctcgaggtggtggtcgttgttgcgctgctgcagctgcgtgatctcctcgcaaagctctcgctgccgctgttgttctcgctcgcgcaccagctccagctccaagcaacgacgtcgcagctcatccgcgcgctgttcaagctgcgtcagctcgacctcgcgagacgcgcaccgttcgcacgagtccgttctgctgaagcttccagagcgcgaggtaattgacggtcgccgctgttgttgttgtcgctgctgtaaatgactaagtgcgttctgctgtcccgtagagtcccaggagctgtacggcgcgtcgtagcgctgcagctctgtctccaacgctgcattctgttcatgtagtcgctgcgcgtctctcacggcgcgatcgcggtcaagttgagcagcttcaagttcatcgtgcagagcgtcaatctcctcgcgcgcagtgctcagctcctccagcagcgcgttgcccgcgttcgccgccaatcgaaggttatcctgctccgccgcgagctccagcagcacgcgcgccagcttctcctccatcagccgctccctcgcggtcgcaacagcgatggaggcgtcctcttccgcctctgggttattgctgcggcgcttggcgtctccacgacctgcagcctgctcaagagcgagagcgtcgtggggcgctgccgcctcgctgagcctgaagctggagctgcggccgccctcgtccaccagcaagtcgacgatcaactgtcgcacgtggcccagcagcgcgtcgcctcggtccgcgtcatcgtgcaggtcgacgtcgccggcctcgtcctgccggtcgccactagcaagatgcgcgcggctgctgcgactgctgctgctcgccgtgggcgacgccagcgcccactggttgggactcgtgcaggccatcctggactccttcgagtcttagtcttagtcaaacgcccgatggaggagtgagtgagtgagtggggaaacgccaacaagcgccggacttggagctccgagcctaacggacgtgggactgcgctgagctgagagctacggtgctgtgtgctgtggtgtcttcaattgcgctggggcggcgtgaagtcgcggcttctgcccgcggcttggtgatggcgatgaagagctcaactgccaatttgtaacggctcagttgtgtaaaagtagtgtaccgtaccagtttcagtctcgagtattttctgttctggctcgctaaatctggagatgtgaagggcggactttgctttgccattgcgaactcacagtcaatcgctacgtcgtgctttttgcgtgtcaggagcgtacgcaaactcggcgtcgtacgggtctccatccttcatctctctctcctctcgctctatagggaacaaactgaagttttcgtcgtctggacgagtcccgcgtggcttgttgacgttgaagttgcatcgctcagtagacgaatggcacatctgagtgagtccccttggttgatctactccgtgttacaattattcactccactcatgcactctttattaggtgaaaggcatggagaggcgatgcagagacgcggagagctgatgcaggagcggatgcaactgctggcgatccgcacgggctacccggaggtgttcaaccgcccgcgtcggagctctccctcgtctacagcgaacgctactgcagttgttgcagctagcagtcagctgggatcgagcagtattcgagcgattagtcgcgacagctcgtacccgtaccagcagcgacgcacacccgaagaaatggcggaattcgtacgtgtcctccagtagttctcagcatgaattcgcagctaaatgcttcgtgtgttgctggtagagtcgtctgtgcgagcagcgagtggctcttacgaaggagaaggggattcaagcgcaacggcaagcgttggccgctgagcaacagcgtcaagctcggagccagctcgcaggtgaagctgctccggctcaggcggtccagagacttcgtgaacgacgagagaaacagcgtcgtgcagctgaagcggaactggaggcgctggtgaatcagcaggactcgtcacttgaggcgatgaacatcgcgcgaatgctatcaccgagattccaggagcgcatggaatacgccccctcggtagccaagtactcggctgaagatgagcgggtcaagcagctacttggaaccacacgcataggaacctactaccaatgagctccactgcaatcgcgatgaattttatgagcttaggtaaatacttgtatgcagtactatttcgctcagaacggtcctcgaagactacatttgttcttcgctagagcgttgccgtacttggtgtgcatggtatggcgccggtgtttatctgtggccggttcgcggggctcaatctttcgagcataatagtcgacctctgtctgcgtcgaaaatcgaccagcggcgtacagattgtaccgttcgttatcaactgcagccgacgcggaggttgaatcttcagggtcttggtgctgctcttcccacttctgagctagagagtggatcttgcaggtagttgccggccctttagctcgaggattgagttgcttcgcgtacttccgagttagtttctgcgtgacgtggagaagtttcgtctgcagttggttttcctgttgtcgtagagctctacgctcctgctcggccgggtccacttcgcgctttggtacgggttgatgtggtttctgttgtaccctgcttgaagctttcacagcagagttcatggccagatccaaagcgtcctgttcattctctgggtggtctttcagtgctttgatctgtcgagcaatcgcgcgcgagagttcgggggctgaagcggaagagttgagcatgcactcctccaggtcggtggtgcgaatgagcttccctgcaattaatcgtcgctgtactggcgtgccatgaacgaaattgggtctcttcgttgcaccgagcggcggcgggtccttcggaagtccgagcgtgttcatatcatgcacgcgcggcctgtccgcctgtagtttgatagtcaaaagaatcgttagccccaatgattgactagggtgtgttgtagctttacattgatccatacatgttgtgttcgcagtgactccgccatctcagacttggcaagttgatgcatctctcgtcgaaccttcgtcgggacggcttggtcttgccatgcagtgactccatcgagcgacgtgcgagcgagtaggtccagtgttgataaccccatcggaggatgccgtacgaatgcctccacgtcttccacgacaccatttccatcgtgtacattcgaccgcggtggagccatgacgaatgctctgctaccaaggctactaagcgcccaacaacagactaggatagacagaccaccacactactgtagtaacgctctaagcaccgagctcagagcttgcaagcgaggaagtcgaagacgtctcaactaaataaagagccttcgccatcttggcctgatccaggatctcaccccgagtccttatatttgcatcttgaagcgataccgtaaccagatcgcgatggttcctagtcacagaggaccacttcgaaactttaacgggatttcatcgaggcaatacacgggactgaagtgtatcaacgctacttgcttctcaccacaatccaagtcgcagcgttcaactcaagcaaccaagtaaccaagcaccaccgcagccatgattcggccggtgtcgcatctccagatgcagcgcgcggggcagccccagcttcagtcgcctcgaaagtctcgcatcaacgcactcttgccaccgtcgtcacccctgaagcattcgtccaccatgttccccaagacaccgatcaagaaacaccttcggaacgcgtcggcgttcgcatccgagacttcttcagttggcgccactgcatccgacgaagacctcgactgcctgtcgggatcgcagctccatggcccgcttaaagccaagctccgcgcctccgtgcttcaggccgtgcttcgattgctcgaccaagacgtggacgctctcgctggggctcacgaggtgcttcaagccgctgctgcactccccttggccgaaccaaaagtgcagcgcgcatgcgtgcaagctctgcgtgagcttcaaggtgtcggctcaatgccgccatcttttgtctacaactccggctcaacgtcaaactcgaactgggacgaatacgagactccggtgccgccgccaagccctcgaaagcagtcggttcggtcgcgaagcagtggacgctcaacgggctcactccaccactgcaaggaattcttgctcgcttgcgctaatgagatctgcgagctcgaagacgatcgcccggtccccttcgactacgctgaagacacgacttcctccaagcaaaccgagtcgcacagtgataaaatgtgcaagcactgcggcgcagcaaacttcgactacgcttcgaccgtgcaggagtccttggatgcttccgctgatagtgacgactgcagcgatgacgatgaagatgatacccgggccgatcagggctcgcagctctccgaagtcctccaccgtgccgagtacatgagcgacgacggagaagacgaatcgagcgatgtggatgctcggccttcaatgtcgatgcgagatcgcgcgatctgtcgccaagttcttcgagctctgcacaggcacttgcagtcccagcgtcgacgttcgagtgccccaagcctggcactgaagttccgcgtcttcgaagctctcaagctccaggccagtcttacccgcaagagactcgcgttccaacgcttgaaggttggacttcgcgcacgtccacagcaacaaccgacgacgcctagccccgctctcgtggccaagacccgcacaccgactcagtcttacacgatgtcgatgcttgcgaaccactcggacttgctgctgctgctcatggcgctggtcttcctcgccttcctgccagccaaatacatcatgtaagttcaagatcaccaacaatcggccgtcaagcccaagctcttttcaagtttcaattaggtttcatagaattcggggatagattgatcgatcgatcgttcaacgagtagctggcaagcaggcagtcggaagtgcgacgtcggaggtctcaacataaattacaatggcggcgtcttaacactcaaaccggtcgcacacgagcaggtcgcgggttccttcgcctcgcctgcgcgtgagtctgccaggccccatttcgagcctggcagcctcaattcactcactcacttgcctcgttcccccttcctcccctcactcatgcttctaacactcgtcttcccaatgctttgccttactggaggcccgacgaccgcaacaggccgccactcctctc
